(19) United States
(12) Patent Application Publication
(10) Pub. No.: US 2008/0318218 A1
(43) Pub. Date: Dec. 25, 2008

(54) Compositions and Methods for Inferring an Adverse Effect in Response to a Drug Treatment

(75) Inventor: Tony N. Frudakis, Bradenton, FL (US)

Correspondence Address: DLA PIPER LLP (US), 4365 EXECUTIVE DRIVE, SUITE 1100, SAN DIEGO, CA, 92121-2133, US

(73) Assignee: DNAPrint Genomics, Inc.

(21) Appl. No.: 11/667,532

(22) PCT Filed: Nov. 14, 2005
(86) PCT No.: PCT/US05/41326

§ 371 Date: Nov. 15, 2007

Related U.S. Application Data
(60) Provisional application No. 60/627,453, filed on Nov. 12, 2004.

(51) Int. Cl. C12Q 1/68

(52) U.S. Cl. 435/6

(57) ABSTRACT

Methods are provided for inferring whether a subject to be treated with a drug such as a statin or an ACE inhibitor is likely to suffer an adverse effect due to the treatment. Also provided are compositions for practicing the methods.

### BACKGROUND OF THE INVENTION

[0001] 1. Field of the Invention

[0002] The invention relates generally to methods for inferring a muscle adverse effect due to treatment with a statin, and more specifically to methods of detecting single nucleotide polymorphisms and combinations thereof in a nucleic acid sample that provide an inference as to whether is likely or not likely to have a muscle adverse effect in response to treatment with a statin.

[0003] 2. Background Information

[0004] Heart attacks are the leading cause of death in the United States today. An increased risk of heart attack is linked with abnormally high blood cholesterol levels. Patients with abnormally high cholesterol levels are frequently prescribed a class of drugs called statins to reduce cholesterol levels, thereby reducing the risk of heart attack. However, these drugs are not effective in all patients. Furthermore, in some patients, adverse reactions including muscle adverse effect (e.g., myopathy and rhabdomyolysis). Such an adverse response may require that treatment of a patient be changed or discontinued.

[0005] Variable statin responses likely can be explained, at least in part, by genetic differences of patients. Human beings differ by up to 0.1% of the 3 billion letters of DNA present in the human genome. Though humans are 99.9% identical in genetic sequence, it is the 0.1% that determines the uniqueness of an individual. Though our individuality is apparent from visual inspection—anyone can recognize that we have facial features, heights and colors, and that these features are, to an extent, heritable (i.e. sons and daughters tend to resemble their parents more than strangers)-our individuality extends to less apparent features, including the ability to respond to and metabolize drugs.

[0006] An identification of the precise molecule details responsible for individuality is a challenging task. The human genome project resulted in the sequencing of the human genome. However, this sequencing was the result of sampling taken from a small number of individuals. Therefore, while this sequencing was an important scientific milestone, the initial sequencing of the human genome does not provide adequate information regarding genetic differences between individuals to allow identification of markers on the genome that are responsible for our individuality, particularly whether an individual will respond to statins and, if so, whether adverse effects such as muscle adverse effects are likely to occur. If the genetic markers that were responsible for different statin responses between people were identified, then an individual's genotype for key markers could be determined, and this information could be used by a physician to decide whether to prescribe statins, and which statins to prescribe. Such personalized medicine can improve the response rate in individuals, while, at the same time, reducing adverse reactions. Thus, there is a need for methods and compositions that allow an inference of muscle adverse effects in a subject treated with as statin based on an individual's genotype for key markers.

### SUMMARY OF THE INVENTION

[0007] The present invention is based, in part, on the identification of single nucleotide polymorphisms (SNPs) that are associated with adverse effects due to drug treatment. As such, the SNPs provide a tool for personalized medicine in that the identification of one or more SNPs allows an inference to be drawn as to whether a human subject to be treated with a drug, particularly a statin or an angiotensin converting enzyme (ACE) inhibitor is likely to suffer an adverse effect due to treatment with the drug.

[0008] Accordingly, in one embodiment, the present invention relates to a method for inferring a muscle adverse effect statin response of a human subject from a nucleic acid sample of the subject. Such a method can be performed, for example, by identifying, in a nucleic acid sample from the subject, a nucleotide occurrence of at least one statin response-related SNP of a marker as set forth in any of Tables 1, 2, 4, 5, or a combination thereof, whereby the nucleotide occurrence is associated with a muscle adverse effect in response to administration of the statin, thereby inferring the muscle adverse effect statin response of the subject. The muscle adverse effect statin response, which can be detected by a patient describing the symptoms or by measuring creatine kinase (CK) levels in the subject, can be any undesirable muscle or musculoskeletal effect, and can include symptoms varying from mild aching to severe pain, usually in proximal muscle groups, muscle stiffness and weakness, myalgia (usually associated with a 3-10 fold increase in CK levels above normal), myopathy (usually associated with CK levels more than 10 times greater than normal), or rhabdomyolysis (usually associated with CK levels more than 40 times the upper limit of normal).

[0009] In certain embodiments, the marker is nucleotides 3911-4379 of SEQ ID NO: 134; nucleotides 31264-31822 of SEQ ID NO: 131; nucleotides 22281-23778 of SEQ ID NO: 143; nucleotides 3482-4414 of SEQ ID NO: 134; e. nucleotides 1895-2286 of SEQ ID NO: 132; nucleotides 650-1166 of SEQ ID NO: 131; nucleotides 771-1171 of SEQ ID NO: 142; nucleotides 79999-80360 of SEQ ID NO: 133; nucleotides 31264-31822 of SEQ ID NO: 131; nucleotides 2440-2560 of SEQ ID NO: 134; nucleotides 23757-24069 of SEQ ID NO: 131; nucleotides 30438-30711 of SEQ ID NO: 131; nucleotides 23571-24967 of SEQ ID NO: 131; nucleotides 12971-14510 of SEQ ID NO: 143; nucleotides 26896-27098 of SEQ ID NO: 130; nucleotides 8115-8737 of SEQ ID NO: 143; nucleotides 13465-13865 of SEQ ID NO:138; nucleotides 26056-26456 of SEQ ID NO: 138; nucleotides 26167-26197 of SEQ ID NO: 138; nucleotides 17636-18035 of SEQ ID NO: 138; nucleotides 25354-25754 of SEQ ID NO: 138; nucleotides 12153-12553 of SEQ ID NO:138; nucleotides 7082-7942 of SEQ ID NO:139; nucleotides 5779-5827 of SEQ ID NO:135; nucleotides 5851-6442 of SEQ ID NO:135; nucleotides 7909-8504 of SEQ ID NO: 139; nucleotides 651-1166 of SEQ ID NO: 131; nucleotides 4351-4750 of SEQ ID NO:139 nucleotides 3138-3500 of SEQ ID NO:139; nucleotides 3482-4414 of SEQ ID NO:131; nucleotides 4397-4797 of SEQ ID NO:139; nucleotides 31264-31813 of SEQ ID NO:131; nucleotides 16240-16589 of SEQ ID NO:145; nucleotides 25192-2298 of SEQ ID NO:145; nucleotides 11344-12528 of SEQ ID NO:139; nucleotides 2800-3685 of SEQ ID NO:129; 30350-30631 of SEQ ID NO:131; nucleotides 750-1110 of SEQ ID NO:134; nucleotides 5880-6229 of SEQ ID NO:145; nucleotides 25192-25479 of SEQ ID NO:145; nucleotides 17794-18106 of SEQ ID NO:130; nucleotides 26895-27098 of SEQ ID NO: 130; nucleotides 26895-25478 of SEQ ID NO: 130; nucleotides 34-825 of SEQ ID NO: 127; nucleotides 11012-11412 of SEQ ID NO: 135; nucleotides 3178-3786 of SEQ ID NO:134; nucleotides 143-518 of SEQ ID NO:140; nucleotides 17795-18116 of SEQ ID NO:130; nucleotides 3388-3786 of SEQ ID NO:134; nucleotides 502-902 of SEQ ID NO:126; nucleotides 23737-24368 of SEQ ID NO:131; nucleotides 1805-2204 of SEQ ID NO:131; nucleotides 5841-6441 of SEQ ID NO:135; nucleotides 26613-27098 of SEQ ID NO:130; nucleotides 19968-20369 of SEQ ID NO:138; nucleotides 19636-21357 of SEQ ID NO: 136; nucleotides 2440-2560 of SEQ ID NO: 134; nucleotides 5881-6229 of SEQ ID NO: 142; the complement of any of these nucleotide regions.

[0010] In various aspects of the invention, the SNP is located at nucleotide 4332 of SEQ ID NO: 134; nucleotide 31683 of SEQ ID NO: 131; nucleotide 23077 of SEQ ID NO: 143; nucleotide 4208 of SEQ ID NO: 134; nucleotide 2098 of SEQ ID NO: 132; nucleotide 860 of SEQ ID NO:131; nucleotide 971 of SEQ ID NO:142; nucleotide 2098 of SEQ ID NO: 133; nucleotide 80160 SEQ ID NO: 131; nucleotide 2500 of SEQ ID NO: 134; nucleotide 23809 of SEQ ID NO: 131; nucleotide 30635 of SEQ ID NO: 131; nucleotide 24272 of SEQ ID NO: 131; nucleotide 13780 of SEQ ID NO: 143; nucleotide 296935 of SEQ ID NO: 130; nucleotide 8462 of SEQ ID NO: 143; nucleotide 13665 of SEQ ID NO:138; nucleotide 26256 of SEQ ID NO:138; nucleotide 26137 of SEQ ID NO:138; nucleotide 17836 of SEQ ID NO:138; nucleotide 25554 of SEQ ID NO:138; nucleotide 12353 of SEQ ID NO:138; nucleotide 7444 of SEQ ID NO:139; nucleotide 5832 of SEQ ID NO:135; nucleotide 6063 of SEQ ID NO:135; nucleotide 8004 of SEQ ID NO:139; nucleotide 860 of SEQ ID NO:131; nucleotide 4550 of SEQ ID NO:139; nucleotide 3300 of SEQ ID NO:139; nucleotide 4208 of SEQ ID NO:131; nucleotide 4597 of SEQ ID NO:139; nucleotide 31671 of SEQ ID NO:131; nucleotide 16399 of SEQ ID NO: 145; nucleotide 2097 of SEQ ID NO: 145; nucleotide 11987 of SEQ ID NO: 139; nucleotide 3500 of SEQ ID NO:129; nucleotide 30434 of SEQ ID NO:131; nucleotide 930 of SEQ ID NO:134; nucleotide 6046 of SEQ ID NO:145; nucleotide 25286 of SEQ ID NO: 145; nucleotide 18060 of SEQ ID NO:130; nucleotide 26950 of SEQ ID NO:130; nucleotide 26950 of SEQ ID NO:130; nucleotide 734 of SEQ ID NO:127; nucleotide 11212 of SEQ ID NO:135; nucleotide 3671 of SEQ ID NO:134; nucleotide 326 of SEQ ID NO:140; nucleotide 18060 of SEQ ID NO:130; nucleotide 3671 of SEQ ID NO: 134; nucleotide 702 of SEQ ID NO:126; nucleotide 24205 of SEQ ID NO:131; nucleotide 2005 of SEQ ID NO:131; nucleotide 6063 of SEQ ID NO:135; nucleotide 26806 of SEQ ID NO: 130; nucleotide 20169 of SEQ ID NO: 138; nucleotide 20343 of SEQ ID NO: 136; nucleotide 6183 of SEQ ID NO: 142 or nucleotide 2500 of SEQ ID NO: 134.

[0011] A method of identifying a nucleotide occurrence of at least one statin response-related SNP can be performed, for example, by incubating the nucleic acid sample with a probe or primer that selectively hybridizes to or near a nucleic acid molecule comprising the nucleotide occurrence of the SNP, and detecting selective hybridization of the primer or probe. Selective hybridization of the primer can be detected, for example, by performing a primer extension reaction, and detecting a primer extension reaction product comprising the primer. In one aspect, the primer extension reaction comprises a polymerase chain reaction.

[0012] In another aspect, the method includes identifying a nucleotide occurrence of each of at least two statin response-related SNPs. The statin response-related SNP can be a SNP as set forth in any of SEQ ID NOS:1-90, or a combination thereof. For example, the statin response-related SNP can be a Lipitor® statin response-related SNP as set forth in any of SEQ ID NOS:1-45, or a combination thereof, the detection of such. SNPs being useful for determining whether a subject should be treated with a Lipitor® statin; or can be a Zocor® statin response-related SNP as set forth in any of SEQ ID NOS:28, 32, 38, 41, 43, and 46-90, or a combination thereof, the detection of such SNPs being useful for determining whether a subject should be treated with a Zocor® statin.

[0013] In another embodiment, the present invention relates to a method for inferring a dry cough adverse effect ACE inhibitor response of a human subject from a nucleic acid sample of the subject. Such a method can be performed, for example, by identifying, in the nucleic acid sample, a nucleotide occurrence of at least one ACE inhibitor response-related SNP of a marker as set forth in any of Tables 1, 2, 4, 5, or a combination thereof, whereby the nucleotide occurrence is associated with a dry cough effect in response to administration of the ACE inhibitor, thereby inferring the dry cough adverse effect ACE inhibitor response of the subject. The ACE inhibitor can be any ACE inhibitor commonly used to treat high blood pressure, cardiovascular disease, and the like, including, for example, benazepril (Lotensin®; Novartis), captopril (Capoten®; Bristol-Myers Squibb), enalapril (Vasotec®; Merck), fosinopril (Monopril®; Bristol-Myers Squibb), and lisinopril—Prinivil®; Merck; also Zestril®; Astra-Zeneca).

[0014] A method of identifying a nucleotide occurrence of at least one ACE inhibitor response-related SNP can be performed, for example, by incubating the nucleic acid sample with a probe or primer that selectively hybridizes to or near a nucleic acid molecule comprising the nucleotide occurrence of the SNP, and detecting selective hybridization of the primer or probe, thereby identifying the nucleotide occurrence. Selective hybridization of the primer can be performed as discussed above, including, for example, by detecting a primer extension reaction product comprising the primer, wherein the primer extension reaction can be a polymerase chain reaction.

[0015] In one aspect, the method is performed by identifying a nucleotide occurrence of each of at least two ACE inhibitor response-related SNPs. The ACE inhibitor response-related SNP identified according to the present methods can be one or more SNPs as set forth in any of SEQ ID NOS:91-124. For example, the ACE inhibitor response-related SNP can be an enalapril ACE inhibitor response-related SNP as set forth in any of SEQ ID NOS:91-109, or a combination thereof, the detection of such SNPs being useful for determining whether a subject should be treated with enapril; or can be a lisinopril ACE inhibitor response-related SNP as set forth in any of SEQ ID NOS:110-124, or a combination thereof, the detection of such SNPs being useful for determining whether a subject should be treated with normal doses of lisinopril.

[0016] A method for inferring a poor metabolizer phenotype of a human subject from a nucleic acid sample of the subject is also provided by the invention. The method comprises identifying in the nucleic acid sample, an occurrence of at least one single nucleotide polymorphism (SNP) of a CYP2D6 marker, wherein the SNP is associated with the poor metabolizer phenotype, thereby inferring the poor metabolizer phenotype of the subject. In one embodiment, the poor metabolizer phenotype is associated with the CYP2D6*4 allele.

[0017] In certain aspects of this method the CYP2D6 marker comprises at least about 100 nucleotides of SEQ ID NO: 134, 147 or 148. The marker can for example, be nucleotides 3911-4379 of SEQ ID NO:134 and the SNP can be located at nucleotide 4332 of SEQ ID NO: 134. In other aspects of the invention, the marker is nucleotides 2440-2560 of SEQ ID NO: 134 while the SNP can be located at nucleotide 2500 of SEQ ID NO:134. In one embodiment SNPs in both markers are detected, which can involve comprising identifying the genotype of the SNPs at nucleotide 4332 of SEQ ID NO:134 and nucleotide 2500 of SEQ ID NO:134, wherein a TT and TC genotype or a TC and TC genotype, respectively, is associated with a poor metabolizer phenotype.

[0018] The marker can, for example, be CYP2D6_; RS1058174 or CYP2D6_RS2267446. In one embodiment, the poor metabolizer phenotype is associated with myalgia in atorvastatin-treated patients. According to this method of the invention, a myalgia response to atorvostatin can be inferred.

[0019] The present invention also relates to compositions for practicing the present methods, including, for example, primers and probes useful for detecting a SNP as set forth in Tables 1, 2, 4 and 5, and/or in SEQ ID NOS:1 to 124. Also provided are kits, which can contain such compositions and are useful for practicing the present methods.

### DETAILED DESCRIPTION OF THE INVENTION

[0020] Statins such as Lipitor® and Zocor® are a popular class of drugs used to treat hypercholesterolemia and significantly reduce risk of cardiovascular disease. The statins are 2-hydroxy-3-methylglutaryl coenzyme A (HMG-CoA) inhibitors. Treatment with Lipitor® and Zocor®, as well as most other statins, has been associated with a muscle adverse reaction (myopathy) characterized by rhabdomyolysis, serum creatine kinase (CK) elevations, and muscle pain (myalgia), weakness and/or cramping. Statin-induced myopathy is rare; Thompson et al., (JAMA 289:1681-1690. (2003), the entire contents of which are incorporated by reference herein) described FDA MEDWATCH Report database search results suggesting that the incidence of myopathy is 1% to 5%. Myopathology is a serious side effect of statin treatment, and statin administration to patients experiencing myopathological symptoms is routinely discontinued, or the patients are switched to another drug. The pathology arises from an over-exuberant response to the statin such that synthetic cholesterol levels are suppressed to such a degree or in such a way that normal cellular functions requiring cholesterol are inhibited. One of these functions is the construction of bilayer lipid cellular membranes involved in natural cell turnover, and the first symptom of inhibition of cellular replenishment is manifest as muscle pain, particularly where physical action, cellular stress, and cell turnover is relatively extreme.

[0021] Fortunately, death due to myopathologic adverse responses to statin treatment is relatively rare, in part because physicians are aware of and sensitive to the problem. Thompson et al., supra, reported a death incidence due to rhabdomyolysis at 0.15 deaths per 1 million prescriptions. However, treating patients with drugs that cause adverse side effects is clearly undesirable, is not cost effective, and the long term consequences of even mild myopathology is not clearly understood. As such, it would be beneficial to be able to predict whether a patient is more likely than others to have an adverse muscle response to a given statin so that the drug can be avoided, thus eliminating wasted drug as well as minimizing the chances of causing damage that may very well have long-term, chronic effects later in life. Since both Lipitor® and Zocor® are metabolized by the cytochrome P450 system, and since aberrant metabolism of drugs is commonly associated with adverse events and reduced efficacy, a systematic candidate gene screen and a whole genome screen were initiated to identify markers associated with myopathologic adverse events for both Lipitor® and Zocor®.

[0022] As disclosed herein, SNPs have been identified that allow an inference to be drawn as to whether a human individual is likely to respond to treatment with a statin (Example 1) or with an angiotensin converting enzyme (ACE) inhibitor (Example 2), including whether the individual may have an adverse effect due to the treatment. Accordingly, in one embodiment, the invention relates to methods for inferring a statin response, including a muscle adverse effect, of a human subject from a nucleic acid sample of the subject. In another embodiment, the invention relates to methods for inferring an ACE inhibitor response, including a dry cough adverse effect, of a human subject from a nucleic acid sample of the subject.

[0023] The methods of the invention are based, in part, on the identification of single nucleotide polymorphisms (SNPs) that, alone or in combination, including when combined into haplotypes, allow an inference to be drawn as to a statin response or an ACE inhibitor response. As such, the compositions and methods of the invention are useful, for example, for identifying patients who are more likely than others to respond to statin (or ACE inhibitor) treatment and more likely than others not to suffer adverse effects of statin (or ACE inhibitor) treatment. In one aspect, the invention provides a method for inferring a statin response of a human subject from a nucleic acid sample of the subject by identifying in the biological sample, a nucleotide occurrence of at least one statin response-related single nucleotide polymorphism (SNP) corresponding to a SNP as set forth in Example 1. In another aspect, the invention provides a method for inferring an ACE inhibitor response of a human subject from a nucleic acid sample of the subject by identifying in the biological sample, a nucleotide occurrence of at least one ACE inhibitor response-related SNP corresponding to a SNP as set forth in Example 2. It will be recognized that the SNPs to be examined will depend on the particular statin (or ACE inhibitor) to be prescribed, such SNPs being identified in Examples 1 and 2. In another aspect of the invention, a nucleotide occurrence of each of at least two statin (or ACE inhibitor) response-related SNPs is identified, wherein the nucleotide occurrences of at least two of the statin (or ACE inhibitor) response-related SNPs can comprise at least one haplotype allele.

[0024] An inference drawn according to a method of the invention can be strengthened by identifying a second, third, fourth or more statin (or ACE inhibitor) response-related haplotype allele in the same, or preferably different statin (or ACE inhibitor) response-related gene(s). Accordingly, the method can further include identifying in the nucleic acid sample at least a second response-related haplotype allele.

[0025] Statins are a class of medications that have been shown to be effective in lowering human total cholesterol (TC) and low density lipoprotein (LDL) levels in hyperlipidemic patients. The drugs act at the step of cholesterol synthesis. By reducing the amount of cholesterol synthesized by the cell, through inhibition of the HMG CoA reductase gene (HMGCR), the drug initiates a cycle of events that culminates in the increase of LDL uptake by liver cells. As LDL uptake is increased, total cholesterol and LDL levels in the blood decrease. Lower blood levels of both factors are associated with lower risk of atherosclerosis and heart disease, and the Statins are widely used to reduce atherosclerotic morbidity and mortality. Nonetheless, some patients show no response to a given statin.

[0026] Methods of the present invention provide an inference of a statin response after administration of statins to a subject. The inference of the present invention assumes that statins are administered at an effective dosage, for example, using FDA approved guidelines including dosages, for those statins that are FDA approved. An effective dosage is a dosage where a statin has been shown to reduce serum cholesterol in the general population. It will be understood that any method of the present invention, or SNP identified herein, will be useful both for predicting a positive response to statins (or ACE inhibitors), as well as a negative response (e.g., a muscle adverse effect).

[0027] Drugs such as statins are referred to a “xenobiotics” because they are chemical compounds that are not naturally found in the human body. Xenobiotic metabolism genes make proteins whose sole purpose is to detoxify foreign compounds present in the human body, and they evolved to allow humans to degrade and excrete harmful chemicals present in many foods (such as tannins and alkaloids from which many drugs are derived). Examples of statins include, but are not limited to, Fluvastatin (Lescol™), Atorvastatin (Lipitor™), Lovastatin (Mevacor™), Pravastatin (Pravachol™), Simvastatin (Zocor™), Cerivastatin (Baycol™). The chemical structure of these statins are known and widely available. For example, Atorvastatin calcium is {R—(R*,R*)}-2-(4-fluorophenyl)-b,d-dihydroxy-5-(1-methylethyl)-3-phenyl-4 {(phenylamino)carbonyl}-1H-pyrrole-1-heptanoic acid, calcium salt (2:1) trihydrate. The empirical formula of atorvastatin calcium is (C₃₃H₃₄FN₂O₅)₂Ca.3H2O and its molecular weight is 1209.42. Simvastatin is butanoic acid, 2,2-dimethyl-, 1,2,3,7,8,8a-hexahydro-3,7-dimethyl-8-{2-(tetrahydro-4-hydroxy-6-oxo-2H-pyran-2-yl)-ethyl}-1-naphthalenyl ester, {1S*-{1a,3a,7b,8b(2S*,4S),-8ab}}. The empirical formula of Simvastatin is C₂₅H₃₈O₅ and its molecular weight is 418.57. Pravastatin sodium is designated chemically as 1-Naphthalene-heptanoic acid, 1,2,6,7,8,8a-hexahydro-b,d,6-trihydroxy-2-methyl-8-(2-methyl-1-oxobutoxy)-, monosodium salt, {1S-{1a(bS*,d S*),2a,6a,8b(R*),8aa}}-. Formula C₂₃H₃₅NaO₇, Molecular Weight is 446.52.

[0028] Effective treatment with a statin results in lowering of serum cholesterol levels. Such a positive response to statins can be determined by a cholesterol test to determine whether cholesterol levels are lowered as a result of statin administration. Such tests include total cholesterol (TC) and/or low density lipoprotein (LDL) measurements, and are well known and widely used in clinical practice, e.g., methods for determining levels of TC and LDL in blood, especially serum samples. A cholesterol test is often performed to evaluate risks for heart disease. As is known in the art, cholesterol is an important normal body constituent, used in the structure of cell membranes, synthesis of bile acids, and synthesis of steroid hormones. Since cholesterol is water insoluble, most serum cholesterol is carried by lipoproteins (chylomicrons, VLDL, LDL, and HDL). The term “LDL” means LDL-cholesterol and “HDL” means HDL-cholesterol. The term “cholesterol” means total cholesterol (VLDL+LDL+HDL). Excess cholesterol in the blood has been correlated with cardiovascular disease. LDL is sometimes referred to as “bad” cholesterol, because elevated levels of LDL correlate most directly with coronary heart disease. HDL is sometimes referred to as “good” cholesterol since high levels of HDL reduce risk for coronary heart disease.

[0029] Preferably, cholesterol is measured after a patient has fasted. In 2001, guidelines from the National Cholesterol Education Panel recommended that all lipid tests be performed fasting and should measure total cholesterol, HDL, LDL and triglycerides. The total cholesterol measurement, as with all lipid measurements, is typically reported in milligrams per deciliter (mg/dL). Typically, the higher the total cholesterol, the more at risk a subject is for heart disease. A value of less than 200 mg/dL is a “desirable” level and places the subject in a group at less risk for heart disease. Levels over 240 mg/dL may put a subject at almost twice the risk of heart disease as compared to someone with a level less than 200 mg/dL. High LDL cholesterol levels may be the best predictor of risk of heart disease.

[0030] The statin response-related SNPs and haplotypes of the invention can be used to infer whether a patient's cholesterol levels are more likely to be reduced by statin treatment and, further, whether the patient is likely to exhibit a muscle adverse effect. A patient whose cholesterol levels, e.g. LDL levels or TC levels, are reduced by statin treatment can be referred to as responders. However, for classification of a subject as a Responder, a cutoff cholesterol reduction minimum can be set. For example, a subject can be classified as a Responder if TC or LDL are reduced by at least 1%, or both TC and LDL are reduced by at least 20%.

[0031] As used herein, the term “at least one”, when used in reference to a gene, SNP, haplotype, or the like, means 1, 2, 3, 4, 5, 6, 7, 8, 9, 10, etc. Reference to “at least a second” gene, SNP, or the like, for example, a statin response-related gene, means two or more, i.e., 2, 3, 4, 5, 6, 7, 8, 9, 10, etc., statin response-related genes.

[0032] The term “haplotypes” as used herein refers to groupings of two or more nucleotide SNPs present in a gene. The term “haplotype alleles” as used herein refers to a non-random combination of nucleotide occurrences of SNPs that make up a haplotype. Haplotype alleles are much like a string of contiguous sequence bases, except the SNPs are not adjacent to one another on a chromosome. For example, SNPs can be included as part of the same haplotype, even if they are thousands of base pairs apart from one another on a genome. Typically, SNPs that make up a haplotype are from the same gene.

[0033] Penetrant statin response-related haplotype alleles are haplotype alleles whose association with a statin response is strong enough to be detected using simple genetics approaches. Corresponding haplotypes of penetrant statin response-related haplotype alleles, are referred to herein as “penetrant statin response-related haplotypes.” Similarly, individual nucleotide occurrences of SNPs are referred to herein as “penetrant statin response-related SNP nucleotide occurrences” if the association of the nucleotide occurrence with a statin response is strong enough on its own to be detected using simple genetics approaches, or if the SNP loci for the nucleotide occurrence make up part of a penetrant haplotype. The corresponding SNP loci are referred to herein as “penetrant statin response-related SNPs.” Haplotype alleles of penetrant haplotypes are also referred to herein as “penetrant haplotype alleles” or “penetrant genetic features.” Penetrant haplotypes are also referred to herein as “penetrant genetic feature SNP combinations.” The SNPs disclosed herein, and listed in Tables 1 and 2 below, include both penetrant and latent (see below) statin response-related SNPs, and make up statin response-related penetrant haplotypes.

[0034] Examples 1 and 2 provide SNPs, including genomic sequences flanking the SNPs, useful for determining a statin and ACE inhibitor response, respectively. From this information, the SNP loci can be identified within the human genome. It will be recognized that the 5′ and 3′ flanking sequences exemplified herein, provide sufficient information to identify the SNP location within the human genome. However, due to variability in the human genome, in addition to the statin and ACE inhibitor response-related SNPs disclosed herein, as well as sequencing inaccuracy and inaccuracy of information available in public databases, the 5′ and 3′ flanking sequences disclosed herein may not be 100% identical to a database entry, but need not be 100% identical to effectively identify the location of the SNP within a database sequence. However, when the flanking sequences are used to search a database of human genome sequences, it is expected that the highest match in terms of sequence identity will be the entry in the database that corresponds to the location within the human genome that includes the SNP surrounded by those flanking sequences.

[0035] Polymorphisms are allelic variants that occur in a population. The polymorphism can be a single nucleotide difference present at a locus, or can be an insertion or deletion of one or a few nucleotides. As such, a single nucleotide polymorphism (SNP) is characterized by the presence in a population of one or two, three or four nucleotides (i.e., adenosine, cytosine, guanosine or thymidine), typically less than all four nucleotides, at a particular locus in a genome such as the human genome. Accordingly, it will be recognized that, while the methods of the invention are exemplified primarily by the detection of SNPs, the disclosed methods or others known in the art similarly can be used to identify other polymorphisms in the exemplified genes or other statin response-related genes.

[0036] Simple genetic tests (e.g., Mendelian) can be used for examining alleles include analyzing allele frequencies in populations with different phenotypes for a statin response or ACE inhibitor response being analyzed, to discover those haplotypes that occur more or less frequently in individuals with a certain response, for example, increased muscle adverse effects. In such simple genetics methods SNP nucleotide occurrences are scored and distribution frequencies are analyzed. Haplotypes can be inferred from genotype data corresponding to certain SNPs using the Stephens and Donnelly algorithm (Am. J. Hum. Genet. 68:978-989, 2001). Haplotype phases (i.e., the particular haplotype alleles in an individual) can also be determined using the Stephens and Donnelly algorithm (Am. J. Hum. Genet. 68:978-989, 2001). Software programs are available which perform this algorithm (e.g., The PHASE program, Department of Statistics, University of Oxford).

[0037] In one example, called the Haploscope method (U.S. Ser. No. 10/120,804, filed Apr. 11, 2002, the contents of which are incorporated by reference in its entirety) a candidate SNP combination is selected from a plurality of candidate SNP combinations for a gene associated with a genetic trait. Haplotype data associated with this candidate SNP combination are read for a plurality of individuals and grouped into a positive-responding group and a negative-responding group based on whether predetermined trait criteria, such as a statin response, for an individual are met. A statistical analysis (as discussed below) on the grouped haplotype data is performed to obtain a statistical measurement associated with the candidate SNP combination. The acts of selecting, reading, grouping, and performing are repeated as necessary to identify the candidate SNP combination having the optimal statistical measurement. In one approach, all possible SNP combinations are selected and statistically analyzed. In another approach, a directed search based on results of previous statistical analysis of SNP combinations is performed until the optimal statistical measurement is obtained. In addition, the number of SNP combinations selected and analyzed may be reduced based on a simultaneous testing procedure.

[0038] As used herein, the term “infer” or “inferring”, when used in reference to a statin response or ACE inhibitor response, means drawing a conclusion about a response using a process of analyzing individually or in combination, nucleotide occurrence(s) of one or more statin or ACE inhibitor response-related SNP(s), respectively, in a nucleic acid sample of the subject, and comparing the individual or combination of nucleotide occurrence(s) of the SNP(s) to known relationships of nucleotide occurrence(s) of the statin response-related SNP(s). In some cases, the inference that can be drawn according to the methods of the present invention are very strong and have great predictive value. In some cases, the inference drawn can be conclusive or determinative of the response analyzed. In other cases, the inference is of a weaker association is weaker and may be associated with a slight or moderate increase in risk of response. Such inferences may be considered indicative rather than conclusive or determinative of the response. As disclosed herein, the nucleotide occurrence(s) can be identified directly by examining nucleic acid molecules, or indirectly by examining a polypeptide encoded by a particular gene, wherein the polymorphism is associated with an amino acid change in the encoded polypeptide.

[0039] Methods of performing such a comparison and reaching a conclusion based on that comparison are disclosed in International Publ. No. PCT WO 03/002721 (publ. Jan. 9, 2003) and U.S. patent application Ser. No. 10/188,359, published Nov. 20, 2003 as U.S. Patent Publication No. 20030215819 A1, the entire contents of which are incorporated herein by reference. The inference typically can involve using a complex model that involves using known relationships of known alleles or nucleotide occurrences as classifiers. The comparison can be performed by applying the data regarding the subject's statin response-related haplotype allele(s) to a complex model that makes a blind, quadratic discriminate classification using a variance-covariance matrix. Various classification models are discussed in more detail herein.

[0040] To determine whether haplotypes are useful in an inference of a statin response, numerous statistical analyses can be performed. Allele frequencies can be calculated for haplotypes and pair-wise haplotype frequencies estimated using an EM algorithm (Excoffier and Slatkin, Mol Biol Evol. 1995 September; 12(5):921-7). Linkage disequilibrium coefficients can then be calculated. In addition to various parameters such as linkage disequilibrium coefficients, allele and haplotype frequencies, chi-square statistics and other population genetic parameters such as Panmitic indices can be calculated to control for ethnic, ancestral or other systematic variation between the case and control groups.

[0041] Markers/haplotypes with value for distinguishing the case matrix from the control, if any, can be presented in mathematical form describing any relationship and accompanied by association (test and effect) statistics. A statistical analysis result which shows an association of a SNP marker or a haplotype with a statin (or ACE inhibitor) response with at least 80%, 85%, 90%, 95%, or 99%. In some embodiments, 95% confidence, or alternatively a probability of insignificance (p value) less than 0.05, can be used to identify haplotypes. These statistical tools may test for significance related to a null hypothesis that an on-test SNP allele or haplotype allele is not significantly different between the groups. If the significance of this difference is low, it suggests the allele is not related to a statin response. The discovery of haplotype alleles can be verified and validated as genetic features for statin response using a nested contingency analysis of haplotype cladograms.

[0042] The observance of a number of haplotypes in nature that is far fewer than the number of haplotypes possible is common and appreciated as a general principle among those familiar with the state of the art, and it is commonly accepted that haplotypes offer enhanced statistical power for genetic association studies. This phenomenon is caused by systematic genetic forces such as population bottlenecks, random genetic drift, selection, and the like, which have been at work in the population over time, typically for millions of years, and have created a great deal of genetic “pattern” in the present population. As a result, working in terms of haplotypes offers a geneticist greater statistical power to detect associations, and other genetic phenomena, than working in terms of disjoined genotypes. For larger numbers of polymorphic loci the disparity between the number of observed and expected haplotypes is larger than for smaller numbers of loci.

[0043] In diploid organisms such as humans, somatic cells, which are diploid, include two alleles for each haplotype. As such, in some cases, the two alleles of a haplotype are referred to herein as a genotype or as a diploid pair, and the analysis of somatic cells, typically identifies the alleles for each copy of the haplotype. Methods of the present invention can include identifying a diploid pair of haplotype alleles. These alleles can be identical (homozygous) or can be different (heterozygous). The haplotypes of a subject can be symbolized by representing alleles on the top and bottom of a slash (e.g., ATG/CTA or GTT/AGA), where the sequence on the top of the slash represents the combination of polymorphic alleles on the maternal chromosome and the other, the paternal (or vice versa).

[0044] The methods of the invention that include identifying a nucleotide occurrence in the sample for at least one statin (or ACE inhibitor) response-related SNP; in preferred embodiments can include grouping the nucleotide occurrences of the statin response-related SNPs into one or more identified haplotype alleles of a statin response-related haplotype. To infer the statin response of the subject, the identified haplotype alleles are then compared to known haplotype alleles of the statin response-related haplotype, wherein the relationship of the known haplotype alleles to the statin response is known.

[0045] The methods and compositions of the invention have numerous utilities, the most obvious of which is that they can be used to determine whether to prescribe statins to a patient with elevated serum cholesterol levels or ACE inhibitors to a patient with coronary artery disease. A sample useful for practicing a method of the invention can be any biological sample of a subject that contains nucleic acid molecules, including portions of the gene sequences to be examined, or corresponding encoded polypeptides, depending on the particular method. As such, the sample can be a cell, tissue or organ sample, or can be a sample of a biological fluid such as semen, saliva, blood, and the like. A nucleic acid sample useful for practicing a method of the invention will depend, in part, on whether the SNPs of the haplotype to be identified are in coding regions or in non-coding regions. Thus, where at least one of the SNPs to be identified is in a non-coding region, the nucleic acid sample generally is a deoxyribonucleic acid (DNA) sample, particularly genomic DNA or an amplification product thereof. However, where heteronuclear ribonucleic acid (RNA), which includes unspliced mRNA precursor RNA molecules, is available, a cDNA or amplification product thereof can be used. Where the each of the SNPs of the haplotype is present in a coding region of a gene(s), the nucleic acid sample can be DNA or RNA, or products derived therefrom, for example, amplification products. Furthermore, while the methods of the invention generally are exemplified with respect to a nucleic acid sample, it will be recognized that particular haplotype alleles can be in coding regions of a gene and can result in polypeptides containing different amino acids at the positions corresponding to the SNPs due to non-degenerate codon changes. As such, in another aspect, the methods of the invention can be practiced using a sample containing polypeptides of the subject.

[0046] Numerous methods for identifying haplotype alleles in nucleic acid samples (also referred to a surveying the genome) are disclosed herein or otherwise known in the art. As disclosed herein, nucleic acid occurrences for the individual SNPs that make up the haplotype alleles are determined, then, the nucleic acid occurrence data for the individual SNPs is combined to identify the haplotype alleles. The Stephens and Donnelly algorithm (Am. J. Hum. Genet. 68:978-989, 2001, which is incorporated herein by reference) can be applied to the data generated regarding individual nucleotide occurrences in SNP markers of the subject, in order to determine the alleles for each haplotype in the subject's genotype. Other methods that can be used to determine alleles for each haplotype in the subject's genotype, for example Clarks algorithm, and an EM algorithm described by Raymond and Rousset (Raymond et al. 1994. GenePop. Ver 3.0. Institut des Siences de l'Evolution. Universite de Montpellier, France. 1994)

[0047] The SNPs disclosed herein include flanking nucleotide sequences, which can serve to aid in the identification of the precise location of the SNPs in the human genome, and serve as target gene segments useful for performing methods of the invention. A target polynucleotide typically includes a SNP locus and a segment of a corresponding gene that flanks the SNP. Primers and probes that selectively hybridize at or near the target polynucleotide sequence, as well as specific binding pair members that can specifically bind at or near the target polynucleotide sequence, can be designed based on the disclosed gene sequences and information provided herein.

[0048] Latent statin (or ACE inhibitor) response-related haplotype alleles are haplotype alleles that, in the context of one or more penetrant haplotypes, strengthen the inference of a statin response. Latent statin response-related haplotype alleles are typically alleles whose association with a statin response is not strong enough to be detected with simple genetics approaches. Latent statin response-related SNPs are individual SNPs that make up latent statin response-related haplotypes. It is possible that some of the SNPs which forms statin response-related haplotypes disclosed herein, are latent statin response-related SNPs.

[0049] The subject for the methods of the present invention can be a subject of any race. As such, the subject can be of any group of people classified together on the basis of common history, nationality, or geographic distribution. For example, the subject can be of African, Asian, Australia, European, North American, and South American descent. In certain embodiments the subject is Asian, Hispanic, African, or Caucasian. In one embodiment the subject is Caucasian.

[0050] As used herein, the term “selective hybridization” or “selectively hybridize,” refers to hybridization under moderately stringent or highly stringent conditions such that a nucleotide sequence preferentially associates with a selected nucleotide sequence over unrelated nucleotide sequences to a large enough extent to be useful in identifying a nucleotide occurrence of a SNP. It will be recognized that some amount of non-specific hybridization is unavoidable, but is acceptable provide that hybridization to a target nucleotide sequence is sufficiently selective such that it can be distinguished over the non-specific cross-hybridization, for example, at least about 2-fold more selective, generally at least about 3-fold more selective, usually at least about 5-fold more selective, and particularly at least about 10-fold more selective, as determined, for example, by an amount of labeled oligonucleotide that binds to target nucleic acid molecule as compared to a nucleic acid molecule other than the target molecule, particularly a substantially similar (i.e., homologous) nucleic acid molecule other than the target nucleic acid molecule. Conditions that allow for selective hybridization can be determined empirically, or can be estimated based, for example, on the relative GC:AT content of the hybridizing oligonucleotide and the sequence to which it is to hybridize, the length of the hybridizing oligonucleotide, and the number, if any, of mismatches between the oligonucleotide and sequence to which it is to hybridize (see, for example, Sambrook et al., “Molecular Cloning: A laboratory manual (Cold Spring Harbor Laboratory Press 1989)).

[0051] An example of progressively higher stringency conditions is as follows: 2×SSC/0.1% SDS at about room temperature (hybridization conditions); 0.2×SSC/0.1% SDS at about room temperature (low stringency conditions); 0.2×SSC/0.1% SDS at about 42° C. (moderate stringency conditions); and 0.1×SSC at about 68° C. (high stringency conditions). Washing can be carried out using only one of these conditions, e.g., high stringency conditions, or each of the conditions can be used, e.g., for 10-15 minutes each, in the order listed above, repeating any or all of the steps listed. However, as mentioned above, optimal conditions will vary, depending on the particular hybridization reaction involved, and can be determined empirically.

[0052] The term “polynucleotide” is used broadly herein to mean a sequence of deoxyribonucleotides or ribonucleotides that are linked together by a phosphodiester bond. For convenience, the term “oligonucleotide” is used herein to refer to a polynucleotide that is used as a primer or a probe. Generally, an oligonucleotide useful as a probe or primer that selectively hybridizes to a selected nucleotide sequence is at least about 15 nucleotides in length, usually at least about 18 nucleotides, and particularly about 21 nucleotides or more in length.

[0053] A polynucleotide can be RNA or can be DNA, which can be a gene or a portion thereof, a cDNA, a synthetic polydeoxyribonucleic acid sequence, or the like, and can be single stranded or double stranded, as well as a DNA/RNA hybrid. In various embodiments, a polynucleotide, including an oligonucleotide (e.g., a probe or a primer) can contain nucleoside or nucleotide analogs, or a backbone bond other than a phosphodiester bond. In general, the nucleotides comprising a polynucleotide are naturally occurring deoxyribonucleotides, such as adenine, cytosine, guanine or thymine linked to 2′-deoxyribose, or ribonucleotides such as adenine, cytosine, guanine or uracil linked to ribose. However, a polynucleotide or oligonucleotide also can contain nucleotide analogs, including non-naturally occurring synthetic nucleotides or modified naturally occurring nucleotides. Such nucleotide analogs are well known in the art and commercially available, as are polynucleotides containing such nucleotide analogs (Lin et al., Nucl. Acids Res. 22:5220-5234 (1994); Jellinek et al., Biochemistry 34:11363-11372 (1995); Pagratis et al., Nature Biotechnol. 15:68-73 (1997), each of which is incorporated herein by reference).

[0054] The covalent bond linking the nucleotides of a polynucleotide generally is a phosphodiester bond. However, the covalent bond also can be any of numerous other bonds, including a thiodiester bond, a phosphorothioate bond, a peptide-like bond or any other bond known to those in the art as useful for linking nucleotides to produce synthetic polynucleotides (see, for example, Tam et al., Nucl. Acids Res. 22:977-986 (1994); Ecker and Crooke, BioTechnology 13:351360 (1995), each of which is incorporated herein by reference). The incorporation of non-naturally occurring nucleotide analogs or bonds linking the nucleotides or analogs can be particularly useful where the polynucleotide is to be exposed to an environment that can contain a nucleolytic activity, including, for example, a tissue culture medium or upon administration to a living subject, since the modified polynucleotides can be less susceptible to degradation.

[0055] A polynucleotide or oligonucleotide comprising naturally occurring nucleotides and phosphodiester bonds can be chemically synthesized or can be produced using recombinant DNA methods, using an appropriate polynucleotide as a template. In comparison, a polynucleotide or oligonucleotide comprising nucleotide analogs or covalent bonds other than phosphodiester bonds generally are chemically synthesized, although an enzyme such as T7 polymerase can incorporate certain types of nucleotide analogs into a polynucleotide and, therefore, can be used to produce such a polynucleotide recombinantly from an appropriate template (Jellinek et al., supra, 1995). Thus, the term polynucleotide as used herein includes naturally occurring nucleic acid molecules, which can be isolated from a cell, as well as synthetic molecules, which can be prepared, for example, by methods of chemical synthesis or by enzymatic methods such as by the polymerase chain reaction (PCR).

[0056] In various embodiments, it can be useful to detectably label a polynucleotide or oligonucleotide. Detectable labeling of a polynucleotide or oligonucleotide is well known in the art. Particular non-limiting examples of detectable labels include chemiluminescent labels, radiolabels, enzymes, haptens, or even unique oligonucleotide sequences.

[0057] A method of the identifying a SNP also can be performed using a specific binding pair member. As used herein, the term “specific binding pair member” refers to a molecule that specifically binds or selectively hybridizes to another member of a specific binding pair. Specific binding pair member include, for example, probes, primers, polynucleotides, antibodies, etc. For example, a specific binding pair member includes a primer or a probe that selectively hybridizes to a target polynucleotide that includes a SNP loci, or that hybridizes to an amplification product generated using the target polynucleotide as a template.

[0058] As used herein, the term “specific interaction,” or “specifically binds” or the like means that two molecules form a complex that is relatively stable under physiologic conditions. The term is used herein in reference to various interactions, including, for example, the interaction of an antibody that binds a polynucleotide that includes a SNP site; or the interaction of an antibody that binds a polypeptide that includes an amino acid that is encoded by a codon that includes a SNP site. According to methods of the invention, an antibody can selectively bind to a polypeptide that includes a particular amino acid encoded by a codon that includes a SNP site. Alternatively, an antibody may preferentially bind a particular modified nucleotide that is incorporated into a SNP site for only certain nucleotide occurrences at the SNP site, for example using a primer extension assay.

[0059] A specific interaction can be characterized by a dissociation constant of at least about 1×10⁻⁶ M, generally at least about 1×10⁻⁷M, usually at least about 1×10⁻⁸ M, and particularly at least about 1×10⁻⁹ M or 1×10⁻¹⁰ M or greater. A specific interaction generally is stable under physiological conditions, including, for example, conditions that occur in a living individual such as a human or other vertebrate or invertebrate, as well as conditions that occur in a cell culture such as used for maintaining mammalian cells or cells from another vertebrate organism or an invertebrate organism. Methods for determining whether two molecules interact specifically are well known and include, for example, equilibrium dialysis, surface plasmon resonance, and the like.

[0060] Numerous methods are known in the art for determining the nucleotide occurrence for a particular SNP in a sample. Such methods can utilize one or more oligonucleotide probes or primers, including, for example, an amplification primer pair, that selectively hybridize to a target polynucleotide, which contains one or more statin response-related SNP positions. Oligonucleotide probes useful in practicing a method of the invention can include, for example, an oligonucleotide that is complementary to and spans a portion of the target polynucleotide, including the position of the SNP, wherein the presence of a specific nucleotide at the position (i.e., the SNP) is detected by the presence or absence of selective hybridization of the probe. Such a method can further include contacting the target polynucleotide and hybridized oligonucleotide with an endonuclease, and detecting the presence or absence of a cleavage product of the probe, depending on whether the nucleotide occurrence at the SNP site is complementary to the corresponding nucleotide of the probe.

[0061] An oligonucleotide ligation assay also can be used to identify a nucleotide occurrence at a polymorphic position, wherein a pair of probes that selectively hybridize upstream and adjacent to and downstream and adjacent to the site of the SNP, and wherein one of the probes includes a terminal nucleotide complementary to a nucleotide occurrence of the SNP. Where the terminal nucleotide of the probe is complementary to the nucleotide occurrence, selective hybridization includes the terminal nucleotide such that, in the presence of a ligase, the upstream and downstream oligonucleotides are ligated. As such, the presence or absence of a ligation product is indicative of the nucleotide occurrence at the SNP site.

[0062] An oligonucleotide also can be useful as a primer, for example, for a primer extension reaction, wherein the product (or absence of a product) of the extension reaction is indicative of the nucleotide occurrence. In addition, a primer pair useful for amplifying a portion of the target polynucleotide including the SNP site can be useful, wherein the amplification product is examined to determine the nucleotide occurrence at the SNP site. Particularly useful methods include those that are readily adaptable to a high throughput format, to a multiplex format, or to both. The primer extension or amplification product can be detected directly or indirectly and/or can be sequenced using various methods known in the art. Amplification products which span a SNP loci can be sequenced using traditional sequence methodologies (e.g., the “dideoxy-mediated chain termination method,” also known as the “Sanger Method” (Sanger, F., et al., J. Molec. Biol. 94:441 (1975); Prober et al. Science 238:336-340 (1987)) and the “chemical degradation method,” “also known as the “Maxam-Gilbert method” (Maxam, A. M., et al., Proc. Natl. Acad. Sci. (U.S.A.) 74:560 (1977)), both references herein incorporated by reference) to determine the nucleotide occurrence at the SNP loci.

[0063] Methods of the invention can identify nucleotide occurrences at SNPs using a “microsequencing” method. Microsequencing methods determine the identity of only a single nucleotide at a “predetermined” site. Such methods have particular utility in determining the presence and identity of polymorphisms in a target polynucleotide. Such microsequencing methods, as well as other methods for determining the nucleotide occurrence at a SNP loci are discussed in Boyce-Jacino, et al., U.S. Pat. No. 6,294,336, incorporated herein by reference, and summarized herein.

[0064] Microsequencing methods include the Genetic Bit Analysis method disclosed by Goelet, P. et al. (WO 92/15712, herein incorporated by reference). Additional, primer-guided, nucleotide incorporation procedures for assaying polymorphic sites in DNA have also been described (Komher et al, Nucl. Acids. Res. 17:7779-7784 (1989); Sokolov, Nucl. Acids Res. 18:3671 (1990); Syvanen, et al., Genomics 8:684-692 (1990); Kuppuswamy et al., Proc. Natl. Acad. Sci. (U.S.A.) 88:1143-1147 (1991); Prezant et al, Hum. Mutat. 1:159-164 (1992); Ugozzoli et al., GATA 9:107-112 (1992); Nyren et al., Anal. Biochem. 208:171-175 (1993); and Wallace, WO89/10414). These methods differ from Genetic Bit™ methods. Analysis in that they all rely on the incorporation of labeled deoxynucleotides to discriminate between bases at a polymorphic site. In such a format, since the signal is proportional to the number of deoxynucleotides incorporated, polymorphisms that occur in runs of the same nucleotide can result in signals that are proportional to the length of the run (Syvanen et al. Amer. J. Hum. Genet. 52:46-59 (1993)).

[0065] Alternative microsequencing methods have been provided by Mundy (U.S. Pat. No. 4,656,127) and Cohen, D. et al (French Patent 2,650,840; PCT Appl. No. WO91/02087) which discusses a solution-based method for determining the identity of the nucleotide of a polymorphic site. As in the Mundy method of U.S. Pat. No. 4,656,127, a primer is employed that is complementary to allelic sequences immediately 3′-to a polymorphic site.

[0066] In response to the difficulties encountered in employing gel electrophoresis to analyze sequences, alternative methods for microsequencing have been developed. Macevicz (U.S. Pat. No. 5,002,867), for example, describes a method for determining nucleic acid sequence via hybridization with multiple mixtures of oligonucleotide probes. In accordance with such method, the sequence of a target polynucleotide is determined by permitting the target to sequentially hybridize with sets of probes having an invariant nucleotide at one position, and a variant nucleotides at other positions. The Macevicz method determines the nucleotide sequence of the target by hybridizing the target with a set of probes, and then determining the number of sites that at least one member of the set is capable of hybridizing to the target (i.e., the number of “matches”). This procedure is repeated until each member of a sets of probes has been tested.

[0067] Boyce-Jacino, et al., U.S. Pat. No. 6,294,336 provides a solid phase sequencing method for determining the sequence of nucleic acid molecules (either DNA or RNA) by utilizing a primer that selectively binds a polynucleotide target at a site wherein the SNP is the most 3′ nucleotide selectively bound to the target.

[0068] In one particular commercial example of a method that can be used to identify a nucleotide occurrence of one or more SNPs, the nucleotide occurrences of statin response-related SNPs in a sample can be determined using the SNP-IT™ method (Orchid BioSciences, Inc., Princeton, N.J.). In general, SNP-IT™ is a 3-step primer extension reaction. In the first step a target polynucleotide is isolated from a sample by hybridization to a capture primer, which provides a first level of specificity. In a second step the capture primer is extended from a terminating nucleotide trisphosphate at the target SNP site, which provides a second level of specificity. In a third step, the extended nucleotide trisphosphate can be detected using a variety of known formats, including: direct fluorescence, indirect fluorescence, an indirect colorimetric assay, mass spectrometry, fluorescence polarization, etc. Reactions can be processed in 384 well format in an automated format using a SNPstream™ instrument (Orchid BioSciences, Inc., Princeton, N.J.).

[0069] In another embodiment, a method of the present invention can be performed by amplifying a polynucleotide region that includes a statin response-related SNP, capturing the amplified product in an allele specific manner in individual wells of a microtiter plate, detecting the captured target allele. Phase known data can be generated by inputting phase unknown raw data from the SNPstream™ instrument into the Stephens and Donnelly's PHASE program.

[0070] Accordingly, using the methods described above, the statin response-related haplotype allele or the nucleotide occurrence of the statin response-related SNP can be identified using an amplification reaction, a primer extension reaction, or an immunoassay. The statin response-related haplotype allele or the statin response-related SNP can also be identified by contacting polynucleotides in the sample or polynucleotides derived from the sample, with a specific binding pair member that selectively hybridizes to a polynucleotide region comprising the statin response-related SNP, under conditions wherein the binding pair member specifically binds at or near the statin response-related SNP. The specific binding pair member can be an antibody or a polynucleotide.

[0071] Antibodies that are used in the methods of the invention include antibodies that specifically bind polynucleotides that encompass a statin response-related or race-related haplotype. In addition, antibodies of the invention bind polypeptides that include an amino acid encoded by a codon that includes a SNP. These antibodies bind to a polypeptide that includes an amino acid that is encoded in part by the SNP. The antibodies specifically bind a polypeptide that includes a first amino acid encoded by a codon that includes the SNP loci, but do not bind, or bind more weakly to a polypeptide that includes a second amino acid encoded by a codon that includes a different nucleotide occurrence at the SNP.

[0072] Antibodies are well-known in the art and discussed, for example, in U.S. Pat. No. 6,391,589. Antibodies of the invention include, but are not limited to, polyclonal, monoclonal, multispecific, human, humanized or chimeric antibodies, single chain antibodies, Fab fragments, F(ab′) fragments, fragments produced by a Fab expression library, anti-idiotypic (anti-Id) antibodies (including, e.g., anti-Id antibodies to antibodies of the invention), and epitope-binding fragments of any of the above. The term “antibody,” as used herein, refers to immunoglobulin molecules and immunologically active portions of immunoglobulin molecules, i.e., molecules that contain an antigen binding site that immunospecifically binds an antigen. The immunoglobulin molecules of the invention can be of any type (e.g., IgG, IgE, IgM, IgD, IgA and IgY), class (e.g., IgG1, IgG2, IgG3, IgG4, IgA1 and IgA2) or subclass of immunoglobulin molecule.

[0073] Antibodies of the invention include antibody fragments that include, but are not limited to, Fab, Fab′ and F(ab′)2, Fd, single-chain Fvs (scFv), single-chain antibodies, disulfide-linked Fvs (sdFv) and fragments comprising either a VL or VH domain. Antigen-binding antibody fragments, including single-chain antibodies, may comprise the variable region(s) alone or in combination with the entirety or a portion of the following: hinge region, CH1, CH2, and CH3 domains. Also included in the invention are antigen-binding fragments also comprising any combination of variable region(s) with a hinge region, CH1, CH2, and CH3 domains. The antibodies of the invention may be from any animal origin including birds and mammals. Preferably, the antibodies are human, murine (e.g., mouse and rat), donkey, ship rabbit, goat, guinea pig, camel, horse, or chicken. The antibodies of the invention may be monospecific, bispecific, trispecific or of greater multispecificity.

[0074] The antibodies of the invention may be generated by any suitable method known in the art. Polyclonal antibodies to an antigen-of-interest can be produced by various procedures well known in the art. For example, a polypeptide of the invention can be administered to various host animals including, but not limited to, rabbits, mice, rats, etc. to induce the production of sera containing polyclonal antibodies specific for the antigen. Various adjuvants may be used to increase the immunological response, depending on the host species, and include but are not limited to, Freund's (complete and incomplete), mineral gels such as aluminum hydroxide, surface active substances such as lysolecithin, pluronic polyols, polyanions, peptides, oil emulsions, keyhole limpet hemocyanins, dinitrophenol, and potentially useful human adjuvants such as BCG (Bacillus Calmette-Guerin) and Corynebacterium parvum. Such adjuvants are also well known in the art.

[0075] Monoclonal antibodies can be prepared using a wide variety of techniques known in the art including the use of hybridoma, recombinant, and phage display technologies, or a combination thereof. For example, monoclonal antibodies can be produced using hybridoma techniques including those known in the art and taught, for example; in Harlow et al., Antibodies: A Laboratory Manual, (Cold Spring Harbor Laboratory Press, 2nd ed. 1988); Hammerling, et al., in: Monoclonal Antibodies and T-Cell Hybridomas 563-681 (Elsevier, N.Y., 1981) (said references incorporated by reference in their entireties). The term “monoclonal antibody” as used herein is not limited to antibodies produced through hybridoma technology. The term “monoclonal antibody” refers to an antibody that is derived from a single clone, including any eukaryotic, prokaryotic, or phage clone, and not the method by which it is produced.

[0076] Where the particular nucleotide occurrence of a SNP, or nucleotide occurrences of a statin response-related haplotype, is such that the nucleotide occurrence results in an amino acid change in an encoded polypeptide, the nucleotide occurrence can be identified indirectly by detecting the particular amino acid in the polypeptide. The method for determining the amino acid will depend, for example, on the structure of the polypeptide or on the position of the amino acid in the polypeptide.

[0077] Where the polypeptide contains only a single occurrence of an amino acid encoded by the particular SNP, the polypeptide can be examined for the presence or absence of the amino acid. For example, where the amino acid is at or near the amino terminus or the carboxy terminus of the polypeptide, simple sequencing of the terminal amino acids can be performed. Alternatively, the polypeptide can be treated with one or more enzymes and a peptide fragment containing the amino acid position of interest can be examined, for example, by sequencing the peptide, or by detecting a particular migration of the peptide following electrophoresis. Where the particular amino acid comprises an epitope of the polypeptide, the specific binding, or absence thereof, of an antibody specific for the epitope can be detected. Other methods for detecting a particular amino acid in a polypeptide or peptide fragment thereof are well known and can be selected based, for example, on convenience or availability of equipment such as a mass spectrometer, capillary electrophoresis system, magnetic resonance imaging equipment, and the like.

[0078] The method can include identifying a nucleotide occurrence of each of at least two (e.g., 2, 3, 4, 5, 6, or more) statin (or ACE inhibitor) response-related SNPs, which can, but need not comprise one or more haplotype alleles, and can, but need not be in one gene. The nucleotide occurrence of the at least one statin response-related SNP can be a minor nucleotide occurrence, i.e., a nucleotide present in a relatively smaller percent of a population including the subject, or can be a major nucleotide occurrence. Minor nucleotide occurrences are generally associated with a higher probability of an adverse response. Where a haplotype allele is determined, the haplotype allele can be a major haplotype allele, or a minor haplotype allele.

[0079] A variety of commonly prescribed medications cause what are commonly considered to be “benign” side effects. Though surrogate markers of adverse response for many FDA approved drugs usually self resolve and are thought to be of little consequence for long term health, there may be more sinister relationships between aberrant surrogate marker test results and long term health than originally thought (Baker et al., 2001; Amacher et al., 2001).

[0080] About 3% of patients who take Statins develop symptoms of hepatocellular (liver) injury. A greater percent of patients exhibit myalgia or muscle pain. Prolonged use in those individuals that exhibit adverse response to Statins can, and does lead to permanent disease. For example, clinical trials showed that about 1% of Baycol patients (similar to other Statins), experienced muscle discomfort and/or creatine kinase elevations in response to treatment. Nonetheless, it took several years of post-trial drug use to illustrate that the relatively high frequency of minor complaints and surrogate marker abnormalities were part of a continuum of clinical pathology that extends, in its extreme, to myonecrosis and even death.

[0081] The incidence of statin induced hepatocellular stress may likewise portend a serious health risks in the Statin patient population (Rienus, 2000). Though Statin induced hepatic stress usually resolves on its own, in some patients it worsens to hepatic injury indicated by decreases in liver weight, jaundice, hepatitis or even death.

[0082] An “adverse statin response” is any negative response to statins, particularly a muscle adverse response such as a myopathy, rhabdomyolysis, and the like. Methods for identifying a muscle adverse effect are well known and include, for example, measuring creatine kinase, wherein increased levels above normal are indicative of adverse response to statins. About 20% of patients who take statins complain of muscle ache, and elevated creatine kinase levels are indicative of myalgia (muscle injury).

[0083] Hepatic stress is another example of a negative response to a statin, possibly accompanied by liver damage. A negative hepatocellular response according to the present invention is inferred by identifying nucleotide occurrences, and optionally haplotypes, of the CYP2D6 gene. Approximately 0.7% of patients taking Atorvastatin exhibit persistent and dose-dependent indications of hepatic stress, the most commonly observed being an elevation in serum transaminase (SGOT, ALTGPT) levels. These and other indications of hepatic stress are indicators of an adverse statin response according to this aspect of the invention. Because drug induced hepatocellular damage is preceded by elevations in liver function tests, physicians routinely perform these tests prior to, at 12 weeks and periodically following the initiation of (or increase in dosage of) Statins and discontinue treatment if the elevations persist. Though clinical trials have shown that only a minor proportion of patients exhibit what are considered “dangerous” SGOT and GPT elevations (the classification of which is entirely arbitrary), it is common knowledge that a significantly higher proportion of patients (up to 30%, unpublished observations) exhibit more modest, but significant elevations greater than 20% of baseline. Additionally, For the average individual, an increase in the SGOT level to 37 or higher, or an increase in the GPT level above 56 signifies an adverse hepatocellular response. However, these thresholds are relevant to the average human, without regard to their race, sex or age.

[0084] Because the incidence of aberrant surrogate marker levels in response to drugs like statins is not small, various laboratories have investigated whether drug pretreatment regimens diminish the severity of adverse hepatocellular injury caused by some drugs by decreasing oxidative stress and lipoperoxidation. The results of these studies indicate that direct measures of hepatocellular health, such as hepatocellular regeneration or DNA fragmentation, are often left unaffected by these pretreatments (Ferrali et al., 1997). The results further suggest that a potential drug-based resolution of statin induced hepatocellular stress may not always proceed without sequelae, and that genetic tests to match patients with Statins may be more effective modality of prophylaxis.

[0085] Before the present invention, it was not possible to predict which patients are at risk of having a muscle adverse effect to statin treatment. For virtually all cytochrome P450s, little is known about interactions of alleles between genes (epistasis) or to what extent pharmacogenomic concepts can be integrated with haploid sets of SNPs and environmental components to explain variance in drug response. The expansion of the new field of pharmacogenomics promises to help us more systematically define the role of drug metabolizer variants in drug response. It is hoped that systematic candidate gene approaches (involving multiple genes per project), multiple markers within each gene, and intensely annotated patient databanks can be economically screened to find new and/or complimentary pharmacogenomics marker sets that explain a greater percent of drug reaction trait variability in the population than previously found. Polymorphisms in the CYP2D6 gene, for example, have been previously discovered by others to be deterministic for undesirable reaction to a variety of commonly prescribed medications Kalow, Pergamon Press, Pharmacogenetics of Drug Metabolism). Catastrophic, Mendelian mutations in this gene have also been associated with various adverse events associated with the use of various drugs. As disclosed herein, natural variation in this gene also is related to variable efficacy of the statins, including commonly observed muscle adverse effects.

[0086] The present invention provides a method for inferring a statin response of a human subject from a nucleic acid sample of the subject, wherein the method includes identifying, in the nucleic acid sample, a nucleotide occurrence of at least one statin response-related single nucleotide polymorphism (SNP) in one of the genes listed in Example 1, whereby the nucleotide occurrence is associated with muscle adverse effect in response to administration of a statin. The present invention also provides a method for inferring an ACE inhibitor response of a human subject from a nucleic acid sample of the subject, wherein the method includes identifying, in the nucleic acid sample, a nucleotide occurrence of at least one ACE inhibitor response-related SNP in one of the genes listed in Example 2, whereby the nucleotide occurrence is associated with a dry cough adverse effect in response to administration of the ACE inhibitor.

[0087] The present invention also related to an isolated human cell or an isolated plurality of cells, which contain a minor nucleotide occurrence of a statin (or ACE inhibitor) response-related SNP or a minor haplotype allele. The cells are useful for drug design, for example of new, more effective statins (or ACE inhibitors) that exhibit fewer side effects. For example, the cells can be used to screen test agents, such as new statins, for efficacy and propensity to elicit an adverse response. Bioassays of test agents using the isolated cells can for example, screen the agent for an effect on activity, such as enzymatic activity, of a CYP2D6 protein. Furthermore, efficacy of an on-test agent can be determined by measuring cholesterol uptake and/or metabolism in the isolated cells. In certain preferred embodiments, the cells are cultured myocytes. Methods are known in the art for testing agents such as statins, on isolated cells, including hepatocytes, for inhibition of CYP2D6 activity (See e.g., Cohen et. al. Biopharm. Drug Dispos. 21:353 (2002)). Isolated cells of the present invention can also be cultured and used to make microsomal preparations for assaying effects of agents such as statins on the activity of CYP2D6.

[0088] Enzyme activity for CYP2D6 after exposure to a statin, such as Atorvastatin, can be analyzed in isolated cells of the present invention, which have at least one minor nucleotide occurrence in at least one statin response-related SNP, and compared to enzyme activity after exposure to the statin of isolated cells which have a major (i.e. wild type) nucleotide occurrence in the corresponding statin response-related SNP, to identify isolated cells which exhibit a different enzymatic activity after exposure to the statin, than cells with a major nucleotide occurrence. This step can be helpful because certain subjects with a minor nucleotide occurrence in a statin response-related SNP can exhibit an efficacious statin response and/or no adverse reactions.

[0089] A method of identifying an agent can be performed, for example, by contacting an isolated cell of the present invention with at least a test agent to be examined as a potential agent for treating elevated serum cholesterol, and detecting an effect on the activity of CYP2D6. In certain embodiments, an effect on the activity of CYP2D56 can be determined by comparing the effect on isolated cells of the present invention which include a minor nucleotide occurrence of a statin response-related SNP, to cells which include a major occurrence at the statin response-related SNP.

[0090] The term “test agent” is used herein to mean any agent that is being examined for the ability to affect the activity of a gene product. The method generally is used as a screening assay to identify previously unknown molecules that can act as a therapeutic agent for treating elevated cholesterol levels. A test agent can be any type of molecule, including, for example, a peptide, a peptidomimetic, a polynucleotide, or a small organic molecule, that one wishes to examine for the ability to act as a therapeutic agent, which is a agent that provides a therapeutic advantage to a subject receiving it. It will be recognized that a method of the invention is readily adaptable to a high throughput format and, therefore, the method is convenient for screening a plurality of test agents either serially or in parallel. The plurality of test agents can be, for example, a library of test agents produced by a combinatorial method library of test agents. Methods for preparing a combinatorial library of molecules that can be tested for therapeutic activity are well known in the art and include, for example, methods of making a phage display library of peptides, which can be constrained peptides (see, for example, U.S. Pat. No. 5,622,699; U.S. Pat. No. 5,206,347; Scott and Smith, Science 249:386-390, 1992; Markland et al., Gene 109:13-19, 1991; each of which is incorporated herein by reference); a peptide library (U.S. Pat. No. 5,264,563, which is incorporated herein by reference); a peptidomimetic library (Blondelle et al., Trends Anal. Chem. 14:83-92, 1995; a nucleic acid library (O'Connell et al., supra, 1996; Tuerk and Gold, supra, 1990; Gold et al., supra, 1995; each of which is incorporated herein by reference); an oligosaccharide library (York et al., Carb. Res., 285:99-128, 1996; Liang et al., Science, 274:1520-1522, 1996; Ding et al., Adv. Expt. Med. Biol., 376:261-269, 1995; each of which is incorporated herein by reference); a lipoprotein library (de Kruif et al., FEBS Lett., 399:232-236, 1996, which is incorporated herein by reference); a glycoprotein or glycolipid library (Karaoglu et al., J. Cell Biol., 130:567-577, 1995, which is incorporated herein by reference); or a chemical library containing, for example, drugs or other pharmaceutical agents (Gordon et al., J. Med. Chem., 37:1385-1401, 1994; Ecker and Crooke, BioTechnology, 13:351-360, 1995; each of which is incorporated herein by reference). Accordingly, the present invention also provides a therapeutic agent identified by such a method, for example, a cancer therapeutic agent.

[0091] Assays that utilize these cells to screen test agents are typically performed on isolated cells of the present invention in tissue culture. The isolated cells can be cells from a cell line, passaged primary cells, or primary cells, for example. An isolated cell according to the present invention can be, for example, a myocyte, or a myocyte cell line. The present invention also relates to a plurality of isolated human cells, which includes at least two (e.g., 2, 3, 4, 5, 6, 7, 8, or more) populations of isolated cells, wherein the isolated cells of one population contain at least one nucleotide occurrence statin (or ACE inhibitor) response related SNP or at least one statin response related haplotype allele that is different from the isolated cells of at least one other population of cells of the plurality.

[0092] In another embodiment the present invention provides a vector containing one or more of the isolated polynucleotides disclosed herein. Many vectors are known in the art, including expression vectors. In one aspect, the vectors of the present invention include an isolated polynucleotide of the present invention that encodes a polypeptide, operatively linked to an expression control sequence such as a promoter sequence on the vector. Sambrook (1989) for example, provides examples of vectors and methods for manipulating vectors, which are well known in the art.

[0093] In another embodiment, the present invention provides an isolated cell containing one or more of the isolated polynucleotides disclosed herein, or one or more of the vectors disclosed in the preceding sentence. As such, the cell is a recombinant cell.

[0094] The present invention also relates to an isolated primer pair, which can be useful for amplifying a nucleotide sequence comprising a SNP in a polynucleotide, wherein a forward primer of the primer pair selectively binds the polynucleotide upstream of the SNP position on one strand and a reverse primer selectively binds the polynucleotide upstream of the SNP position on a complementary strand, wherein the polynucleotide includes a nucleotide occurrence corresponding to a SNP position of the nucleotide sequences set forth in Examples 1 and 2. The present invention also relates to an isolated primer pair, which can be useful for amplifying a nucleotide sequence comprising a SNP in a polynucleotide, wherein a forward primer of the primer pair selectively binds the polynucleotide upstream of the SNP position on one strand and a reverse primer selectively binds the polynucleotide upstream of the SNP position on a complementary strand, wherein the polynucleotide includes a nucleotide occurrence as disclosed herein. The isolated primer pair can include a 3′ nucleotide that is complementary to one nucleotide occurrence of the statin (or ACE inhibitor) response-related SNP. Accordingly, the primer can be used to selectively prime an extension reaction to polynucleotides wherein the nucleotide occurrence of the SNP is complementary to the 3′ nucleotide of the primer pair, but not polynucleotides with other nucleotide occurrences at a position corresponding to the SNP. Randomly selected primers about 20 nucleotides in length, for example, from the five prime and three-prime sequence included in the sequence listing, can be used as primers according to the present invention provided that the A/T:G/C ratios are similar within each primer.

[0095] In another embodiment the present invention provides an isolated probe for determining a nucleotide occurrence of a single nucleotide polymorphism (SNP) in a polynucleotide, wherein the probe selectively binds to a polynucleotide as set forth in Examples 1 and 2, including an alternative nucleotide of the SNP position. In another embodiment, the present invention provides an isolated primer for extending a polynucleotide. The isolated polynucleotide includes a single nucleotide polymorphism (SNP), wherein the primer selectively binds the polynucleotide upstream of the SNP position as disclosed in Examples 1 and 2.

[0096] The present invention further relates to an isolated specific binding pair member, which can be useful for determining a nucleotide occurrence of a SNP in a polynucleotide, wherein the specific binding pair member specifically binds to an alternative nucleotide of a SNP position as disclosed in Examples 1 and 2. For methods wherein the specific binding pair member is a substrate for a primer extension reaction, the specific binding pair member is a primer that binds to a polynucleotide at a sequence comprising the SNP as the terminal nucleotide. As discussed above, methods such as SNP-IT (Orchid BioSciences), utilize primer extension reactions using a primer whose terminal nucleotide binds selectively to certain nucleotide occurrence(s) at a SNP loci, to identify a nucleotide occurrence at the SNP loci.

[0097] The polynucleotides of the present invention have many uses. For example, the polynucleotides can be used in recombinant DNA technologies to produce recombinant polypeptides that can be used, for example, to determine whether a statin binds or effects activity of the polypeptide. The present invention also provides isolated polypeptides that are produced using the isolated polynucleotides of the present invention. In another aspect, the invention provides a method for identifying genes, including statin response genes, SNPs, SNP alleles, haplotypes, and haplotype alleles that are statistically associated with a statin response. This aspect of the invention provides commercially valuable research tools, for example. The approach can be performed generally as follows:

[0098] 1) Select genes from the human genome database that are likely to be involved in a statin response;

[0099] 2) Identify the common genetic variations in the selected genes by designing primers to flank each promoter, exon and 3′ UTR for each of the genes; amplifying and sequencing the DNA corresponding to each of these regions in enough donors to provide a statistically significant sample; and utilize an algorithm to compare the sequences to one another in order to identify the positions within each region of each gene that are variable in the population, to produce a gene map for each of the relevant genes;

[0100] 3) Use the gene maps to design and execute large-scale genotyping experiments, whereby a significant number of individuals, typically at least one hundred, more preferably at least two hundred individuals, of known statin response are scored for the polymorphisms; and

[0101] 4) Use the results obtained in step 3) to identify genes, polymorphisms, and sets of polymorphisms, including haplotypes, that are quantitatively and statistically associated with a statin response.

[0102] The Examples included herein illustrate general approaches for discovering statin response-related SNPs and SNP alleles as provided above.

[0103] The invention also relates to kits, which can be used, for example, to perform a method of the invention. Thus, in one embodiment, the invention provides a kit for identifying SNPs and/or haplotype alleles of statin response-related SNPs and/or ACE inhibitor response-related SNPs. Such a kit can contain, for example, an oligonucleotide probe, primer, or primer pair, or combinations thereof, of the invention, such oligonucleotides being useful, for example, to identify a SNP or haplotype allele as disclosed herein; or can contain one or more polynucleotides corresponding to a portion of a gene, including the SNP position, as set forth in Examples 1 and 2, such a polynucleotide being useful, for example, as a standard (control) that can be examined in parallel with a test sample. In addition, a kit of the invention can contain, for example, reagents for performing a method of the invention, including, for example, one or more detectable labels, which can be used to label a probe or primer or can be incorporated into a product generated using the probe or primer (e.g., an amplification product); one or more polymerases, which can be useful for a method that includes a primer extension or amplification procedure, or other enzyme or enzymes (e.g., a ligase or an endonuclease), which can be useful for performing an oligonucleotide ligation assay or a mismatch cleavage assay; and/or one or more buffers or other reagents that are necessary to or can facilitate performing a method of the invention. The primers or probes can be included in a kit in a labeled form, for example with a label such as biotin or an antibody.

[0104] In one embodiment, a kit of the invention includes one or more primer pairs of the invention, such a kit being useful for performing an amplification reaction such as a polymerase chain reaction (PCR). Such a kit also can contain, for example, one or reagents for amplifying a polynucleotide using a primer pair of the kit. The primer pair(s) can be selected, for example, such that they can be used to determine the nucleotide occurrence of a statin response-related SNP, wherein a forward primer of a primer pair selectively hybridizes to a sequence of the target polynucleotide upstream of the SNP position on one strand, and the reverse primer of the primer pair selectively hybridizes to a sequence of the target polynucleotide upstream of the SNP position on a complementary strand. When used together in an amplification reaction an amplification product is formed that includes the SNP loci.

[0105] In addition to primer pairs, in this embodiment the kit can further include a probe that selectively hybridizes to the amplification product of one of the nucleotide occurrences of a SNP, but not the other nucleotide occurrence. Also in this embodiment, the kit can include a third primer which can be used for a primer extension reaction across the SNP loci using the amplification product as a template. In this embodiment the third primer preferably binds to the SNP loci such that the nucleotide at the 3′ terminus of the primer is complementary to one of the nucleotide occurrences at the SNP loci. The primer can then be used in a primer extension reaction to synthesize a polynucleotide using the amplification product as a template, preferably only where the nucleotide occurrence is complementary to the 3′ nucleotide of the primer. The kit can further include the components of the primer extension reaction.

[0106] In another embodiment, a kit of the invention provides a plurality of oligonucleotides of the invention, including one or more oligonucleotide probes or one or more primers, including forward and/or reverse primers, or a combination of such probes and primers or primer pairs. Such a kit provides a convenient source for selecting probe(s) and/or primer(s) useful for identifying one or more SNPs or haplotype alleles as desired. Such a kit also can contain probes and/or primers that conveniently allow a method of the invention to be performed in a multiplex format. A kit can also include instructions for using the probes or primers to identify a statin or ACE inhibitor response-related SNP and/or haplotype allele.

[0107] The inference drawn according to the methods of the invention can utilize a complex classifier function. However, as illustrated in Example 1 (see, also, PCT International Publ. No. WO 03/002721, published Jan. 9, 2003, and U.S. patent application Ser. No. 10/188,359, published Nov. 20, 2003 as U.S. Patent Publication No. 20030215819 A1, the entire contents of which are incorporated herein by reference), simple classifier systems can be used with the statin or ACE inhibitor response-related SNPs and haplotypes to infer statin or ACE inhibitor response, respectively. However, the methods of the invention, which draw an inference regarding a statin or ACE inhibitor response of a subject can use a complex classification function. A classification function applies nucleotide occurrence information identified for a SNP or set of SNPs such as one or preferably a combination of haplotype alleles, to a set of rules to draw an inference regarding a statin response (see, e.g., U.S. Ser. No. 10/156,995, filed May 28, 2002, which is incorporated herein by reference and provides examples of complex classifier methods).

### EXAMPLE 1

### Identification of SNPs for Inferring Muscle Adverse Effects Due to Statin Treatment

[0108] This example demonstrates that single nucleotide polymorphisms (SNPs) can be identified that allow an inference to be drawn as to whether an individual in more or less likely to have a muscle adverse effect due to treatment with Lipitor® or Zocor®.

[0109] The alleles of 205 xenobiotic metabolism SNPs were initially screened in order to identify those with a statistical association with LIPITOR or ZOCOR response (or Enalapril or Lisinopril; see Example 2). Screening was performed as described in PCT International Publ. No. WO 03/002721 (published Jan. 9, 2003) and U.S. patent application Ser. No. 10/188,359 (published Nov. 20, 2003 as U.S. Patent Publication No. 20030215819 A1; the entire contents of which are incorporated herein by reference which is incorporated herein by reference), and as described below.

[0110] Not all individuals who develop an adverse response to statins harbor the same SNP types at the same loci. This result is not unexpected, as most traits in the human population are the function of complex gene-gene and gene-environment interactions. If a gene product is involved in the metabolism of a given drug, several different polymorphisms in this gene may impair the function of the gene product and thus, the metabolism of the drug. One person may harbor one particular debilitating polymorphism, and another person may harbor another. Thus, on a population level, it is expected that several polymorphisms in the gene can be associated with adverse events associated with use of the drug.

[0111] Briefly, the strength of association is measured with a delta value (Shriver et al., Am. J. Genet., (2002), Shriver et al., Am. J. Genet., 60:1558 (1997), each of which is incorporated herein by reference), which is inversely related to a chi-square statistic (the higher the value, the stronger the association). The delta value measures the difference in allele ratios between one group (in this case, responders) and another (in this case, non-responders). Generally, SNPs with delta values greater than 0.15 are selected, though because the delta value is not very sensitive for sample size, those with delta values above 0.15 that have fewer than 20 counts for the minor allele in the overall sample (responders and non responders combined) generally are discarded.

[0112] Gene markers were selected based on evidence from the scientific and medical literature, and from other sources of information, that implicate them in responsiveness to statins. The Physicians Desk Reference, Online Mendelian Inheritance database (e.g. NCBI) and PubMed/Medline are Examples of sources used for this information. Polymorphisms were identified using raw human genomic data present in public data resources (NCBI database) using data mining tools. The NCBI SNP database, the Human Genome Unique Gene database (Unigene from NCBI) and a DNA sequence database generated for this and similar studies, were used as sources for this raw sequence data. Sequence files for the genes were downloaded from proprietary and public databases and saved as a text file in FASTA format and analyzed using a multiple sequence alignment tool. The text file that was obtained from this analysis served as the input for SNP/HAPLOTYPE automated pipeline discovery software system (as described in U.S. patent application Ser. No. 09/964,059, filed Sep. 26, 2001, which is incorporated herein by reference in its entirety). This method finds candidate SNPs among the input sequences and documents haplotypes for the sequences with respect to the identified SNPs. The method uses a variety of quality control metrics when selecting candidate SNPs including the user specified stringency variables, the PHRED quality control scores and others.

[0113] The public genome database was constructed from a relatively small collection of donors. In order to discover new SNPs that may be under-represented or biased against in the public human SNP and Unigene databases, the CYP2D6 gene was completely sequenced in a larger pool (n=500) of persons (the DNA specimens were obtained from the Coriell Institute, Camden, N.J.). Specimens from this combined pool were used as a template for amplification using a combination of Pfu turbo thermostable DNA polymerase and Taq polymerase. Amplification was performed in the presence of 1.5 nM MgCl₂, 5m M KCl, 1 mM Tris, pH 9.0, and 0.1% Triton X-100 nonionic detergent. Amplification products were cloned into a T-vector using the Clontech (Palo Alto, Calif.) PCR Cloning Kit, transformed into Calcium Chloride Competent cells (Stratagene; La Jolla Calif.), plated on LB-Ampicillin plates and grown overnight.

[0114] Clones were selected from each plate, isolated by a miniprep procedure using the Promega Wizard or Qiagen Plasmid Purification Kit, and sequenced using standard PE Applied Biosystems Big Dye Terminator Sequencing Chemistry. Sequences were deposited into an internet based relational database system, trimmed of vector sequence and quality trimmed. Genotypes were surveyed within the specimen cohorts by sequencing using Klenow fragment-based single base primer extension and an automated Orchid Biosciences SNPstream instrument, based on Dye linked immunochemical recognition of base incorporated during extension. Reactions were processed in 384-well format and the data stored in a temporary database application until transferred to a UNIX based SQL database.

[0115] The data corresponded to SNPs that are informative for distinguishing common genetic haplotypes that were identified from public and private databases. Using algorithms, the data was used to infer haplotypes from empirically determined SNP sequences. Allele frequencies were calculated and pair-wise haplotype frequencies estimated using an EM algorithm (Excoffier & Slatkin, Mol Biol Evol. 12:921-7 (1995)). Linkage disequilibrium (LD) coefficients were then calculated. The analytical approach was based on the case-control study design. Genotype/biographical data matrices for each group were examined using a pattern detection algorithm. The purpose of these algorithms was to fit quantitative (or Mendelian) genetic data with continuous trait distributions (or discrete trait distributions). In addition to various parameters such as LD coefficients, allele and haplotype frequencies (within ethnic, control and case groups), chi-square statistics and other population genetic parameters (such as Panmitic indices) were calculated to control for systematic variation between the case and control groups. Markers/haplotypes with value for distinguishing the case matrix from the control, if any, were presented in mathematical form describing their relationship(s) and accompanied by association (test and effect) statistics.

### Lipitor® Study

[0116] A set of 205 xenobiotic metabolism SNPs, including SNPs in the AHR (SEQ ID NO: 125), CYP1A2 (SEQ ID NO: 127), CYP2B6 (SEQ ID NO: 130), CYP2C8 (SEQ ID NO: 131), CYP2C9 (SEQ ID NO: 132), CYP2D6 (SEQ ID NO: 134), CYP3A4 (SEQ ID NO: 136), CYP3A5 (SEQ ID NO: 137), GSTM1 (SEQ ID NO: 141), GSTM3 (SEQ ID NO: 141), HMGCR (SEQ ID NO: 143), MVK (SEQ ID NO: 144), PON1 (SEQ ID NO: 145), PON3 (SEQ ID NO: 146), CYP1A1 (SEQ ID NO: 126), CYP2C19 (SEQ ID NO: 133), CYP3A4 (SEQ ID NO: 136), CYP3A7 (SEQ ID NO: 138), CYP2E1 (SEQ ID NO: 135), CYP1B1 (SEQ ID NO: 128), CYP2A6 (SEQ ID NO: 129), CYP4B1 (SEQ ID NO: 139), and GSTP1 (SEQ ID NO: 142), were screened as described above and as described in PCT International Publ. No. WO 03/002721 (published Jan. 9, 2003) and U.S. patent application Ser. No. 10/188,359 (published Nov. 20, 2003 as U.S. Patent Publication No. 20030215819 A1) the entire contents of which are incorporated herein by reference. The top SNPs, ranked by delta value are shown in Table 1 (LIPITORDELTA). As shown in Table 1, of the 22 genes screened, four genes —CYP2D6, CYP2C8, HMGCR and GSTP1—showed multiple hits, which indicate that the results obtained are not random with respect to gene level of analysis.

TABLE 1
LIPITORDELTA

| Sample size | Delta | Marker | |
|---|---|---|---|
| 84 | 0.194529 | 179 | CYP2D6_RS1058174_TC |
| 86 | 0.156621 | 391 | CYP2C8_RS1934952_GA |
| 52 | 0.153846 | 2689 | HMGCR_41344_712043_GA |
| 88 | 0.135455 | 2760 | CYP2C8_2185571_TC |
| 88 | 0.134545 | 381 | CYP2C9RS2253635_GA |
| 88 | 0.132727 | 362 | CYP2C8_2071426_GA |
| 88 | 0.128636 | 58 | GSTP1E2E4-5_419_CA |
| 88 | 0.128636 | 424 | GSTP1E2E4-3_466_GT |
| 76 | 0.117325 | 216 | CYP2C19E7-5_169_TC |
| 88 | 0.115 | 374 | CYP2C8_RS1934953_GA |
| 84 | 0.109048 | 172 | CYP2D6_RS2267446_TC |
| 88 | 0.107727 | 369 | CYP2C8_RS1891071_GA |
| 86 | 0.103953 | 282 | CYP2C8E8_296_GA |
| 88 | 0.103636 | 225 | CYP2C8_RS1891073_TC |
| 86 | 0.101163 | 2680 | HMGCRE711_635_756249_GA |
| 84 | 0.100476 | 98 | CYP1A2E7_405_GC |
| 88 | 0.100379 | 188 | CYP2B6RS1042389_TC |
| 86 | 0.097868 | 2657 | HMGCRE5E6_283_809125_TC |

[0117] A similar screen of 10,000 SNPs on a DNA chip (Affymetrix) revealed several other markers associated with adverse muscle reactions to Lipitor®. These results are shown in Table 2 (AFFYLIPMUSC).

TABLE 2
AFFYLIPMUSC

| Sample size | Delta | Marker | P value | Marker |
|---|---|---|---|---|
| 20 | 0.170833 | 2460 | 0.005 | 2406 |
| 86 | 0.148552 | 2468 | 0.005 | 2432 |
| 88 | 0.147727 | 2406 | 0.011 | 2443 |
| 88 | 0.147273 | 2405 | 0.018 | 2405 |
| 88 | 0.145909 | 2409 | 0.018 | 2465 |
| 84 | 0.132381 | 2432 | 0.021 | 2409 |
| 80 | 0.130585 | 2419 | 0.022 | 2468 |
| 86 | 0.129302 | 2450 | 0.034 | 2433 |
| 88 | 0.128636 | 2443 | 0.034 | 2450 |
| 88 | 0.127273 | 2433 | 0.037 | 2391 |
| 84 | 0.111905 | 2445 | 0.04 | 2447 |
| 80 | 0.1 | 2425 | 0.041 | 2419 |
| 88 | 0.099545 | 2407 | 0.045 | 2392 |
| 86 | 0.093256 | 2437 | 0.047 | 2426 |
| 86 | 0.090465 | 2418 | 0.05 | 2394 |
| 84 | 0.083333 | 2394 | 0.05 | 2445 |
| 84 | 0.077143 | 2472 | 0.052 | 2407 |
| 86 | 0.076977 | 2435 | 0.059 | 2418 |
| 88 | 0.076364 | 2463 | 0.069 | 2460 |
| 82 | 0.073668 | 2426 | 0.071 | 2455 |
| 80 | 0.073469 | 2457 | 0.076 | 2463 |
| 84 | 0.070952 | 2404 | 0.082 | 2425 |
| | | | 0.102 | 2437 |

[0118] The SNPs identified above were used to make classifications of patients receiving Lipitor®. Genotypes were determined from a sample (e.g. blood) from patients suffering muscle adverse effects (case) and from patients not suffering muscle adverse effects (controls). Genotypes were selected for which the prevalence between cases and controls was more extreme than 63%:37%, or 37%:63% (giving a risk of non-response in terms of classification theory of about 3). As shown in Table 3, the results demonstrated that a Lipitor® patient could be classified into the non-adverse response (muscle reaction) group with 96% accuracy, and that 98% of the cases (individuals who exhibited muscle reactions) were properly classified. Representative portions of the gene sequences, including the SNP position, used for this classification performance are shown below (SNPs indicated in parentheses; SEQ ID NOS:1-45; “Marker” numbers also indicated, below—compare Tables 1 and 2). The skilled artisan will recognize that the sequences given below can be single or double stranded, even though only one strand is shown. Thus, the invention is contemplated to include the polynucleotide strand shown, the complementary strand, and a double-strand form of the sequence.

TABLE 3
0.37 CUTOFF COLUMN AZ NO INCONCLUSIVES of 94
CLASSED

| | |
|---|---|
| CASE | CONTROL |

| | | | |
|---|---|---|---|
| CASE | 49 | 1 | 0.98 |
| CONTROL | 16 | 26 | 0.619048 |
| | 0.753846 | 0.962963 | 0.815217 |

81% Efficiency
98% Case Sensitivity

2460 LIPMUSC-RS946816

(SEQ ID NO:1)

CCATGAATGAACACCACTGTCAGGTCCAACAAATGCAAATAAAGTAGGAG
CACTGAAATTTGCTAACAAGAAGAGATGATGAACACAGATGGACCCAAAG
TGGTGGAACAAATTTACATAAGTCAATCTATAATGTGTAAGACACATATA
AACAAAGATGAATTATTTCTTTCTACAATAAT(C/T)TGAACTGTAAGTG
GCTTCTAGAACTAGATTCTCAACTCAGCTATATCAAATATTAAATTACTA
AGGGAACCTTTAGAACACCCAGATATTTTAAGTCTCATACAGATGAGCAC
TGTTTACTTAATTTATATTTAAAAATCCAATAAATG
2468 LIPMUSC-RS957928

(SEQ ID NO:2)

GAATTCAGTCTCCATTACCACCTCTTCAGTTGGAGCTCTTACTCTTACCT
GGAAAAATGCAATCTCTACGTTTCTGGTCACTTACAAGTCACATTCCCTC
CACGCATTTCAGCCACATTAACTTTCTAGATCCACAACCCCAATTTACCC
TCTCCCAGAAACTTGCAATGTAATGCAAAATTAATGTCTGTGCTATCGCC
TGCATCTATTCTCTAAATATAACATCA(A/G)TTGACTTTCCACTGTATT
CTCAATTTTCCTCTTTCTATTGAAAGATAATCTCAACCTCTCTCTAATGG
GCAAGTTGAACCTGCCTTTAAGGCCAATCTCCAATGCCGTATTTTTCAAT
AAAACTTCCTGGGTCCTTCTAGCTGATCATAATCTCTCACAGTTTAAATT
TAGCATCACCTATATTCCTCATGGAATTC
2406 LIPMUSC-RS325032

(SEQ ID NO:3)

CTGCGCCTGGCCAGGAAACTTTGCTTTAATAATGTATTGGCTCAGATTGC
AAGTCATTAATTTATTTGTTCAACAAATGACTGTTTTACTACTGCCTTGT
AAGTGCCAGACAAATGTTAGGCATGTGTAGGTTTGGGGACAAGGGGGATA
GATTAGGGATGAAATAATGATCTAGAAGACATCCGATGTGCCATGAAGGA
CCCAACATTTAACAGGCCACAAGAGGAAAGAGACAGACATGTAATAAATG
ATTTTACTTCAACTCATTAAGTGTTTCAATAAAAGTAGACATAAAGTCCT
GAGGTGGCAATTACTAGGGATTGGCCAACTGTGGCTCAAGGAACCAGGAA
GTGCCTTATGGAGGAGCCTAATAATTATGATGGTTCTGCTGTCCTTTGTA
CTATTGTTTAAGATTCATGCCCAATCTAATACCTGATGAC(G/C)TAATC
TTTTTATTGCTTGTGGTTCTCCTTGAGGAAGATGATGAAGAGAGGTGAAA
ACTGCTTCAGCCACCCTCCCCCCGAGGACTGCTGCCCTGCCTTATTTTCC
TTAAGTTTCTGTACCATGCCTCTGACAGAAGAGAAAGTTTATCCCTGGGG
AGGCAAGTGGAGATGAGGCCTAGCATTCCATATGGAGATCCTGGATCCCC
TTCCTTTTGCCCAATATAGACCTGGGGAAGAGTTCAAGGAAGTGGAGAAA
ACAGTACGTTTCCAAAGGCAGAGCTCCTTCATCTGGGAAACTCCCTCCAG
GGGCTGGCTA
2405 LIPMUSC-RS952299

(SEQ ID NO:4)

GGTAAGTGAGTGCATAATGATTCTGCTCCTGCCCATCTCATTCTCTGCAT
TTTCAAAGCAGGGTAAGTATGCACACAGTTCAGAATTACCTCCATAATTA
CACATAAATAAGTAGCCCAGTAATTAAAACATGAACTGCAAAATACCAGG
GTAATCATTATCTTTGGTGATGGAAAGAGAAAATAAGATTGTACGTGGAG
ACTTCAGCTCTCTGTAATGATTTGTTGTTGTTTTTCTAAGAGCTGAAATG
ATAGCATTTGTTAAATTTAGATGACGAGTACACAGGTGTTGATGTATTCC
ATACTTTCCTCAATATTTGAACTATTTCNNNNNNNNNNNNNNNNNNNNNN
NGACATGCAGTGTCTCTCCATTCTCTCGTCAGCACACAGGAATCTGGCGC
CCTCACAAGTTCACACAACAGAAAAACAGCAGGAA(G/C)AAAATGACTT
TCAACCAAGACCAAAGGACAAAGTGAGGGGCGGCAAGATCCCAGCAGGAA
GGGCAACAGGGTCTAGA
2409 LIPMUSC-RS612101

SEQ ID NO:5)

CTTTTTGAATGGCAGGTGCTCTTGCCTGATTAACATTTATTATAGTCAGT
AACTGCAGGAAAGACTGTACACATAACACACGGAGTTATAGGATGTTGGT
GATGTTGGTGTTGGAATGCACCTGTGTAGGATGGTAACTGTCTTTTGCAT
CATGGTAGGAGATTTGGAGACGGAGTCTTACCTAGTTCAAGCCTGTGGTC
CCACCAACTATTAAACCAGTTTAGTAGCTTGACATCTTAGTCTATTTCCT
CACCTATGAAATTCCTACCTCATGGGGTGATTATAGGGAGCAATTAAGAA
GAAGGCGTGAAAATATTTTATGAACTATAAAGCAGGAATACCGGNNNNNN
NNNNNNNNNNNNNNNNNNNNNNNNNNNNNNNNNNNNNCCTGAGGCTGAGA
GATTTGAAGCTT(G/C)TTTTGTTCAGAGTTTTCTAAATCCTAGTTTGAT
CTCTTTTGCTAAATCACACACTCTTGGACAACAGGGACTCATTTTATTCT
CACATCCCTCACAGCAGCTAACGTGAAAATGTTGTTCTTTATTAGAGACA
GCTCCTATCTCATGGATGCACTACAATTACTTTCCATGACTGGCCCTAGG
TTAAGAGAGAATTCCAGGCCAAAGACCTATCTAGA
2432 LIPMUSC-RS967776

(SEQ ID NO:6)

ATAATGCTAGACGGAAGANAATGTAGAGGATTTTGTGGTGGATCTGATGG
TGAGTGGTTAGAGAAGTATTAAGGATGACTTGAATTTTACCCAGAATAAT
TGTTTATACCATTCTTTAAAATCATGAGTTTTGTTTTGGGCATATTAATT
TGCAGATAAACACAAATCCATCAGCAAGATTTAACATAAATCATATTTGT
AGAGGGAGAGTCAGTGAGAAGCAATGAGGGCTTGTGTCTGAGCT(A/G)T
GAGAAATCCCGGTCTTTTAATGGTCTAGATAGTCAGATGGCCTGAAAATG
AGGCAAAACAGGAATAGCTAGAGTTGAGAAAGAACATCCAGGACACTATT
AGAAGCCCAGTTAGAAGATGAGGGAAGAGAGTG
2419 LIPMUSC-RS1384739

(SEQ ID NO:7)

GAGTGGGACACATTTGCCTTCTTTCTTCCCAAAGCACAAGCCAGCACAGG
CCCCATCATCTCCAGAATCAAGTCCAAGTTGCCTTTGTTTGATTTTCAGA
GTCTCTTGGCCTAGTATCAGTCTGCTTCTTAGCTTTACCTGTCAGTGCTA
CACTCTCCTCCTATACTCACCCACCCCACCCAACCTTTGTTCTGGTCACA
CCCAAGCGGTTCAAGGCCCCCTAGCTGGCCCTTCTTCATCTTCGCTGAAA
TGGCATTCCAGG(C/T)TAGCTCTGTTACAGCAGTCATTGTGTACTGGGA
AGTGGCAGGATACAAGATG
2450 LIPMUSC-RS1416527

(SEQ ID NO:8)

GAGGGTCTTCCTACCCAGGTGGAGTCTGTCTTTGAGCCTGTTAACTCACT
ATCCCAGTTTATAAGCAGCCCTTTTTTATGGTAGGCCCCACGTGGTTGGG
TAACCTAACTGATGTGATAATGAGGACAGACTAAAGGTCACGAGATTGTT
AACA(C/T)GTGTGAGGAGATTGTAGGCTTAGCCTATCAGGTGAGGGAAA
GGTTAGCGTACCAACTGTCTCCACACTTCAAAGCATGTAGCTAGTTTGCT
GCACTAACTTAATTATCTGTGCTATTGATATCTTTGAGGAACATATCTAT
ACCCTGGATACAGTTACTTCACAGTAGGAGATAGCAGGAGGTGGCTTGTT
CGGTTGCCAACTTCCTAAAATGCTTTTTAGAGTCAGCTGGGTTGCTTAGT
CCTCTCTTGCTCTTGGATTAAATATAAAAATAACTATGTAAAGCATATCA
GCCCTCTTTTCCCTGTCTGCTGAA
2443 LIPMUSC-RS2200257

(SEQ ID NO:9)

TACAGAACTACAATATTGCAGTCAGGTTTTTTTGTGTTGTGAGATGGCCA
CAAGTTTACAAAGCATCATATATATATGAATTCCNNNNNNNNNNNNNNNN
NNNNNNNNNNNNNNNNNNNNNNNNNNNNNNNNNNNNNNNNNNNNTCTCCA
TATAGTCTTCCCAATCTACGTTTTGAGAGGCCAGGCAGAAAAAAGATGAG
AAAATAAAGGATGTGTATTTAATTAGTCTCTAATCCAATGCTGGACATTT
GCCCAGTAACTTCCCATGCCTCCTCTACCCTTAATCCAGCCTCTCTCTCT
TCTAGAATGACCCTTATCTTCTGGAGACATTCGCACCAGCATGGCCCTGT
GAAATCTCAAATGTGCCTTGGTTTGGGTAAAGGAAAGCAGCCTTGCTAGG
CTGCCTAACACTTTTTCCAGGATAAAGACAGAATCAGATGTCCCACAAGG
GGCCAGCCCAAAATCCATTTAAGTACCTCAATAAATTCTA(C/T)GGCAC
ATCAGTCTGTGAAGCTATATAAAACATATTTAACTCTGTTTTATGACCTA
TTTTACTACTTTTGAGAGCCTTTCCAAACTTTAGAATCACTGTTTTCTCC
AGGAGGAAGGCGCTGATTGGCCCCCTGCAGTCCTGGAAGGCCATTATGGA
GACTGGAATTGGTGTGCTAAAGTCATTATGATTATCATGAATCCTCTATT
TCAACAC
2433 LIPMUSC-RS588037

(SEQ ID NO:10)

TGTACTTCATGCACTGCTCCATCCTCAATGTTTAGATGTATGAATCCAGG
CACTTTTTCTCAA(C/T)GTATCAATAACTTTGCTGAATAATAAGTGTAC
ACAGTGGGACAGGGTAGGCATAAGGTACTGTGGGAGGAAACAAAGATGAC
TCTCATTTTCTGTCTTCAACCAGCGTTTGATCTGGTGGAAGAATTTACAA
TCAAGATGATACTTTCTATTTTACCCTTGCTTTATCTATCATTTCTAGAG
CAATAAAAATAATAACAAGTATGTTTTTAAAAGGAGTCTATTTAGAGCTC
TAGTACACATCAGGTTGCAGTTTTCCATCTGTCAACTGCAGAAACAAATC
CTCTAAAATATAGTGAAATAAAGAAATGTGATGGATAAAAGAAGTGGAAA
ACATTGGCGAAAACAGTACTTTTTTGTCACAAAATGTCAGTGATCACAAA
CTCAGAGGAAATTAATGGAGAAGGTCTACGTTATTTTTTCTTAAAAAATT
GAAGTCAGAATAAGCCACACATTGCTTACAAGGAATTTCAAAGTAAAAAG
TAGGCCTGGCAGCCAGAGTTTGCCCACTGCTCCAAGTGCTATTACAGTTT
ACTCTTCCCTAT
2445 LIPMUSC-RS780373

SEQ ID NO: 11)

TAAGTAAGTAAAGCCTGAAACTCTTAAAAAATTATCTTTGGCTATTTAGA
TTATACTTTTCTGAAAAGGACTCTGTGGTAATGAATCATGTGGTTTCAAG
ATTCACATGCGTTAAAATTACTTCAGGACACTAGTCATTTTTCAATTACC
AGTAGAAGTAAATCTCAAAGGAAGAGTTCTGCAGATTCTTGAGCCATCAA
TGGCCTGTAGGAAATCTTTTGAACAACTGGGTACATGTTGGAGAAAGTAG
GGTCTTGTTAAAACATTTTAAAAATAACTAAACTAAGCCAAAAATCCATT
TTGGATCCATGGGGTAGACTGTCTCATAGAATGTTTCTAAAAGGAGGTTT
TTAAAGTGTTGTTGGATGGTCCCTCTTTTGAGTTG(C/T)TGGAACATAA
ATCATTTGAGACATTTGATTTGATGGTTTATAAAGTTTCCATGACTCTGT
GGTTTATTATTCCCAATTTAGGCACAGGGAGTTGGTTTATATTTATCTAA
TCCAGGTAATAGAGTATTTAATTTCCTGTC
2425 LIPMUSC-RS1343850

(SEQ ID NO:12)

TTTGTTTCTGCATGCAATCCAGCCGACAGCAACTTTTCNTGAGCTATCTC
CATTTCCTCCNNNNNNNNNNNNNNNNNNNNNNNNNNNNNNNNNNNNNNNN
NNNNNACAAAATTTATGAGCACCTGCTGTATGTTGGCATTGCACATAC
(A/G)CATTGGATATAACATTTAAACTACTCTTTTGATCCTTTTAATTGA
AAATGTGATGAAATAATTATTTAAAAGAATTTTTAAAGACTCCACTTTCC
ACTATTTTTAATGACTATTTTTTATCTTACCTTTCAGATTTTACCCATGT
GCATATTTTAAAATACTGAATTCAAATGACAAAACCCTTCATGNNNNNNN
NNNNNNNNNNNNNNNGATACTTATTACTACCTCATATTGTAATTTATCTT
TTACTACATATTAAGCCTTTACATTCCAGTTTTAAACTCTTGCTGCTGAA
GAGAATGAAATTGATATGGATGAAATGTGACTAGATAGAATGAAATAAAT
AGATGTGTTAAG
2407 LIPMUSC-RS1516238

(SEQ ID NO:13)

TTGCACCTGCATCAAACCCCATTGAGAGAACAGATTCAAGAGAGGTGTAA
AGTGTCAAGCCTCAGGACTGCACCCAGAGCATGCTAACTTCCTAGAAGCA
GGAGTAGGGAGAGATTCAGTAAGTAAATCTGAGAAAAAAAATAAAAATAG
GCTAGAGCTAGGGCTACCCACAGGTAATGATGTTTACCCCAACTCCACCA
ATTATTTACCACCCCTTTCCCATATGGGCAGAGGAAAGGATTGGGGTGGA
GAGAGAGACTGGGAATATTCCTTCATTATTGTGTTGGCAAAGACATTGAA
GTTTTCTCCCCTTTCTAGAAACAGGATAAAAGACTATCAACACCTATGTA
AGAAAGACCTACTGTTTTCAGAGTCAGTGAGTCAT(G/C)CAATGCCCTA
TAACTGCCACCCTCACCCACTCAGTGGAAGAAAAAATAACTAAAACATTA
AGCTCTTGCCTTTAATTTCCACTCTTCACCACTGATTAAAACCAGCCATT
AAAAACGGCTGGAGGAGAGAAAGTCTGACTCTTTTTTTGTTGTT
2437 LIPMUSC-rs953004

(SEQ ID NO:14)

TTTATTACCAAGATGATAGAAACCACGGAAAGTTAACAGACAGAAAAACA
GCTCATGGTAC(C/T)ATTGCAATCAAACTCTGACACATTGGGTATAATG
CCTAAAATTGAGAGGAGAAGAAACCTCATAAAGACTAAAACTCACCTTCC
CTCCCCCTTTCAGCTTGAAATAATTTAGCATTTCCTGCTGGCTTTCTTTG
AGGGGTGGCTTCCAGGTATAATTCCTCAAACAGGGAATATTTTTAAATGT
ATCCATATCACAACTTCAATCACTATGTTAAGTGAAGATTCAGCACTCTA
GGCCAGCAACGATTTCTAGAAATATTTTGGCATTTCATTCGTAGCTCTCA
GCCAAGTCATCTCTTGTCTCATATAAAAACTTTCTGATGAACCCACCATA
GATAATCACAACGCATTGCACCTATATAACACATAATACGTTTGAAATGA
TTTTTACAAAAACTGTCTAATTTCATCTGACCTAGGTTACGAAGGATATA
TGATGATTCCCATTTTACAG
2418 LIPMUSC-RS879780

(SEQ ID NO:15)

CTGGAATACAACCCAGCTCACTGTACTGAGTCTCCAGTTTTCAAAAAGTT
AACGTTCCGTANNNNNNNNNNNNNNNNNNNNNNNNNNNNNNNNNNNNNNN
NNNNNNNNNNNNNNNNNNNNNNNNNNNNNNNNNNNNNNNNNNNNNNNNNN
NNNNNNNNNNNNNNNNNNNNNNNNNNNNNNNNNNNNNNNNNNNNNNTAAG
AAGTGGAGGAACCAGGATTTGAACCCAGTTCTCTGTTCCCCAAGCCCATG
TGATTTCATTACCTGAGTTGTCGGTGTCACGGGATCCCCCAGGTGGGTGG
GTGGCCCAGTCATTGTGAATCATTTCAACATTTCTTGTTCATAATGTGTT
GTATGAGCCCACCCTTGGCTTTGGCAGACTTCCTGT(C/T)GATGGGCCA
AACGGTGTTGCCCGGCTAAGAAGGTGGTGTTCTGGTTTACGCCACAGGTT
ATTCTCAGAACACAAAAGTGTGATTTCAATCTTCTGAAAATGACTTCGTG
TAGATGCTTTATTTTATTCTACTTGGATATGCCTGTTCGTGGGGATGACT
GTGCCGACATTCCTTTCAACAGCACAACTGAGATGTTTATAGAGAAAGAT
GAGTTTTCTAGAAGTTTAACTGGCTTTTGCTTTTGTACTGAACTGTTATG
AGTTGGGACAATTTAAACATTAACTTTGGTGTCTTGAATTCACTTGTTTA
TGTTAAGAAAACGTGGGGGCTATACCACCCAAAAATTTATTATAACAGTC
TGGA
2394 LIPMUSC-RS1825935

(SEQ ID NO:16)

TAGATTTACAATACATATTCATGCCTCATTCTGGAAATTTCCGTCATTAC
T(A/C)TCTTTCCTCCCAAATGTTTTTGACTGCTCTCACATGTTTTCTCT
TCCAGGTTGACTATAGAATTATTTTTGCTGATTGAGTTTTTCTNNNNNNN
NNNNNNNNNNNNNNNNNNNNNNNNNNNNNNNNNNNNNNNNNNNNNNNNNN
NNNNNNNNNNNNNNNNNNNNNNNNNNNNNATAGAGGCATACAATCATCTA
TCC
2472 LIPMUSC-RS1323434

(SEQ ID NO:17)

CACTGCCGTCTTCCTCACTCTGTATGAATGGAAGAGTCCATTTGGTTTGA
CTTCCAAGGGGCGAAATAGAAGTAAAGTCTTCTCCTTTTCTTCAGCCTTG
AACATCTGTTATGCCCTCTTGTTTGGCAGAACAGTGGCCATCAAACCTCC
AAAATGTTGGACTGGAAGGTTTCTAATGAACCTTGGGCCATTTTCTGTAT
GTTTTGCCTTTCCACATACACGGCAAACTTGGCTGCTGTCATGGTAGGTG
AGAAGATCTATGAAGAGCTTTCTGGAATACATGACCCCAAGGTAATACTT
CATTTTACTTTAGCTTTCTTGATTGTCCATTATAATTCC(A/G)TATGTT
GTATCTTCTGCTGTAGTATGCTCATGTTCTTCCATCTAACACAGGAATAT
TCTCTCAGCCAAGTATAGAGACTAGTCCAAAAGTCTGTTGCCTGGTTTAA
CTAAATATTCCATTGTTTGTTTCATAAACGAAACAAAAAGACTGAGAAGT
TTTGGGGAGTGTCTTTTCTAGAGTAGGTCTTTCTGATAGAAATATCTATT
AATGCATCTTTTCCTTGTATTATTTGACCATCTGATAGATAGCACACCTA
TCAGGGAATGGTCTT
2435 LIPMUSC-RS2007470

(SEQ ID NO:18)

GCATAAAAGCATTTATGTTCTGTACAAAAAGATCAGACTCCTAACCAGAT
TTAGAGATGCAAATATTTGTACCTAAAGAGAAAGACTTTTTCACCTAAAG
TATAGTTTAGGGCTAGTCATCCAACCCTAAAATGTAGGCCACACCTACTT
CAAGAAACATATTCTTGATTCTAGAGAATAAAAAATGTAACCCCACCTGT
CTGTTCTGGCAGGCTCTGGTCTCTGGAACGCTCCATGATGCAGCTAGGGG
AATATAAGCCAGTTGGCATCCCTGCCTGAGGGTGGTGAGATTAGGCGAAA
GATACTTGCACCAAGCCTCCAGGTCTTTCCTCTGCTTACTGTGGTTCTTC
ATCACAAGGGGAGACAAGTCCTACCTCATTGGCATGCCTCACTTTAAGCA
AAGCATAAATGAGAATATAAGCATTTAAAT(A/G)AAGTGCAGATAGGAA
CATTCCTTTTTACCCTATAAAAAAATGCCATCTGACCTACTATGCCATAA
GAGCATAGTAAAAATACTTTGTTTTGAATAGTTTCAACTAGGCAATTTGT
GAGCATATAGCAAAATGACTATTGAGTTTCAGTTGTGCAAATTTGGAAAA
TCTTACATACATTATGGAAATTAGATTTCTTTCCTTTGACAAATGTATTT
TGTGTACTTTCAAAACGTGTGACATTTTAAGTGTTTGAGAAATGGCACAC
TTGCACACCTTGTTAAAGACTAAAACAGCAACATCTGTGGTCAATTCTGC
CCTATATTAGACAG
2463 LIPMUSC-RS1478838

(SEQ ID NO:19)

AGGTTGTGTTTGACCATTCAGGGCTTTCTCTTGGCCTTAAAAATTCTCAG
TAGTAGTAGTAACTCTCTTCCCTGACGACTTATTTGGTTCTATCATTTCA
AATATGAACATATCAAAAATTCAAGAGAAAAGGGATGAGAAATAAATGAT
TTGTCATGGCACAAAAGAAGGTACAAAATGATGATGTCCAAGACGTAGTG
ACAGTTCTTAATCTCTGTAACAGCAGAGAGGTAGTGAAGAAATAATCATA
CTCAATTGCAACAAAGGGAATTTGATGAAATAACAAGGCCATTTGCAAAG
AATGAGTAGATCAATGGTAGGGCCAGGGATTTGAAAAAAGATTTTAAAAT
GTTTTGAGAAAACTCACACTCTTAATTTTTAGAACTTCAATTTCTTTGTT
TAAAATAAAATCTATCCTTCTTCTTCTTCCAATAACTTGATATTCCATCA
TTACAGAATGTATGAAAGTTTTCTAATGGATTCATTTTTCATGCTCTAGA
AGAAGAAATGATACTATACAATCAACTTACATTGCCTTATCTACTTCCTC
TC(A/G)GTCTCAATTTTAGGCATATGGACTGAACTTGGCACTAGTTTTC
TGTCTGGGCTCAGCTACTTACTATAAAAACTGAAGTAATGTCCTCCATGT
TTGATATATGGTAACTAGTCCTGAAGTGACCAACATAATACAAATGGAAA
GTAACTAACATTATATGTCCTAGTGTTTCCAGTGTGATCTTTCTAAACTT
CTATTGTGTTTCTTAACATTTTTTATTGCTCCCTTTTTCCTTGGATAAAA
TATACATGCTTAGGCATGAAATATTAGACCTATCATTTTCACTAGCCTTA
TCTCATCACTCTTGTTACATTTTCTTAAGCAGACTACAGTGTGCTATTTG
TAAATCACAGATTATAACTTGATATATATTTTATTGTCAAGCCATCAGAT
ATGTGCATTTACTTGACATGTTACTCA
2426 LIPMUSC-RS763354

(SEQ ID NO:20)

TCTTGCCTTTAGGTGTGTTTTACCAAAGGAACAAGACAGAAGATGAATGC
CAAAACTATTAATGCAGCTACCCTGGACACTAAGCCCCCAAAGAGATGGA
GGATTGGAGGATGTAGAGCCTGGGCACTGGGTCCAGTGCTGACATGGAAC
ATGTTCATTCTTAGAGTTTCACTGCAAACACTCCAAGGATAGAGAGCGAG
AAGGTTATGTGGACATGAGAGGAGAAGGGTGGAAGAGGATTGAATGGTTC
AGGGTAGCTAAAAAAAATTTTTACACTTTATCTCGGGCTGCTTCTAAACC
CTCCACCAGAAAGAATTAATCCTGCAAGCACTTAAAACAAAACTGATGTG
AGGAAGATAATAAAACCTGTCCAGGGTACAGACATCCAGATTTGCAATTT
AGGGTGGGAAGACTTTAGAGACCTTGTCTAACAGGGCTAAAGAGTATCCT
TATGGTTTTAAAGTAGGTACATTGTTTTTTGTAAGCATTTCTAGGGTTAT
ATAAGACAAATCAGAGTCTGATGTATTGAACACAATTG(A/G)ATCTTAT
TCTGCCATATTTGTTTTTAATTCACGATTTTTAAATGGATTTACTGGTCA
TATTTCTCAGGTCATGGCAAGATTTTTTAGTCTTAAACTTATTTAGCTCA
GTCC
2457 LIPMUSC-RS1561350

(SEQ ID NO:21)

AATTTCTTCAGAATATTCTCTCCTTAAAGGAAAATAGAAAGGAACTTTAC
TTCAGAGCAGAAATCTTAGATTAATAGGATAAATTGTGTATTAGATATAG
AAAGAAAAAATAGTCATTTTGCAACCAAATAATAAAGTGCCACCATAAAA
ACCTACAACACATAATAAGAATAATAAAAAGAACGAGTTATAAAGAGAAT
CTTCATCAACATTAGAGTAAATGGCATCTAAGCAAATCTGAGTTTAGTAT
CATAGTGTTGGAAAGAAAGAACAAAACAATTACAAACATAACAGTATGGA
TTGTTGTTGTATTTAAAGAAGCGGCCCCTGCTAGTACTTCTAGAATGTAG
AAAGATGAAG(A/G)TTCAGGCATTACCTGCTTCCCAGCTGGTTGGATGA
TTATCCAGCTTAGCATCAGGTAGTTAAGTTGTACTGAGGCAAAATGAAAA
CATGAGAGGATAATGCTAGAGGATCCAGCTGGGCCACAGACAAAGTTTTC
ATTCCTCTATTCACTCNNNNNNNNNNNNNNNNNNNNNNNNNNNNNNNNNN
NNNNNNNNNNNNNNNNNNNNNNNNNNNNNNNNNNNNNNNNNNNNNNNNNN
NNNNNNNNNNNNNNNNNNNNNNNNNNNNNNNNNNNNNNNNNNNNNNNNNN
NGTTAATGCAAAAGAATATCGAGGGTACTCTGATAGAAGTGGGGGGTCAG
TGCTACTTTGAACTTGAATGACTTTTTGAAAAATTCCCTTCCAATTAAGC
AAGGCAGTCTTTTCTATATTCCTA
2404 LIPMUSC-RS1027583

(SEQ ID NO:22)

AGATGTTATTTAATTTTTGTGTTTAATTTAGAGGGATCTCAAGGAAAACG
AAGGTATGTCAGGATGGAGAACAGCACACCATCTTGGGTCTTTGATTGAA
AAGTCATAGCAAGGGTGAGATTACCTGGAGTAGGAATCTGCTAAGGAGGA
CATTCTATCAAAGGATCAGTTTACCTGAAAAATCTCCTTACTGATTAAAA
TTCTTCTTATTCCCTACTTTCTATGTCCTTCTCTAAGCATCACATCTCTA
GATGAGTGCCATTTTTCAAATTCAGTGTGCATAAGTGTCATCTGCAGAAC
TCAATATAAANNNNNNNNNNNNNNNNNNNNNNNNNNNNNNNNNNNNNNNN
NNNNNNNNNNNNNNNNNNNNNNNNNNNNNNNNNNNNNGCTCCTTCTTTGC
AGTTCCTTGCCCTCTATTTGGAAGCTCATGGTGTTTACATTATAAATTCC
TCTTTTCTGGCATCTGACTTTCCCTGTGATGGAGAACAGGGAGTCTGAAT
AGGAAAGCACAGCCTGCCATGAGTACATTTTCAGGCTC(G/C)TTAAGTC
TCATATTCATTTGCCGCAAGGAATGAGAAAAGAAGAGAGAGCAACTAAAG
ACTGCATGTTTCAAACATGGGTGATCATCATTTCTCCTGGGGTAACAGGC
TCCCCTTGGAGAAAGAAATTACAAATTACTAATAGATCATATGGCAGAAA
ATTGCAAATTCCAAGCAAAATAAATATATTCTTCCATTTCTAGAGTTTTA
AATTGGCTATAAGGTAGGAGGGTGCAGTATTAATAGGCAGCTATCAAATA
GAACAGTGGTGTTAAATTACATAATCAATTTAATGTTCTGGGTCAGTTGA
CAAAGAAATCTGTTCTCTCACTGCCACTAATTTAGAGCTTTCAATATCCC
ATTCACAAGTCTTTTTAAAAAACTTTTGGGAAAGATTTTGGTATATCAAA
TTCTTCCATAAACATCTGTAACAGCTGTGTCAGGGATCCCAGACTAGCTG
ACCTTTCTCCTTTTGCAGTCTGAGGGTGGAAATGAGAACATAATCGCCCA
TGATGAGCTGGCTGAGCAAAGTTGGGCCAAGCCATCAAATGCAGCTGTTG
ACTTCCCACAGGATTGATCTCTCTTGCCTCACAGTTCACTTCAGGAGGAA
GGTGTGTAGAATATGAGGCCACATGTCCTGTGTGAGTGTGCATGTGTGTG
TGAATACAAGCACACATGTTCATATCCACA
2465 LIPMUSC-RS719546

(SEQ ID NO:23)

GGGCACACATGGNACANAAGTTATGATCAGGGGCATTACGAAAGTGTTGT
GAGAGAGGTAAAAACAAGGTGACTCATAGAACCGAGCTGTGCCTAGCCGC
ACAAGCAGGGATGCACTGGGCAGAGAGAAGAAGGAGAATGCTGCACACAG
AGAAAATGGCACTGAAGAAGGCAGGGAGGCATGGAAAATCAGGAATGCTC
ACAGGATGGTGAGGTCTTCAAGTTGGGATTAAAGTATATATTTGTTCATT
CTTTCACTCAAAACCATTTTGAAGGGGAGAGAGGGACTATCATGTTCTGA
ACATCATAATGAAAGCTTCTGTGAAAGCCCATGTGACATAACCCAACACA
GTCCTTCCTTGCTGGCCTTACACATTTTACTC(A/G)TTCTTTACTGAGT
TCTTTTCTAAGTACAATGTAATGGTAAAGAGCATGGACTCTAGA
2391 LIPMUSC-RS490618

(SEQ ID NO:24)

TAAATTTGTGGTTCCTTGGTTAACTAATCCAACCTTTCACTGAATCTTTC
TATGGTAACTCTGCTCATCATTTTCTTTCTCTGGTCCCTCCTTTCTCACT
ATATGCTATTGCCTTAGTCTTCTTGATAGTCCAAGAAGCCCAGGGTTTTT
TGTAGCTGAGAGTTGGAATTGGTTTTATAACCCCTTAGGATTGAAGATCA
TCCTCTCAAAGTATTGCACAGAATGTAACACTTTCCAAATGTGGTGTCTA
GCNTGATACTGATATGAGACA(A/T)CCTTACCCCCTGTAATCAAGATAT
TGTATATTTCCTGGCAAGTAAATTTCAAGCCTTTTGGCTCTACAGATTCT
CTGTTTCTTGGTTTAGAGGAAATTTAGCAGGTGATGTGTTATAGTATGGA
GTCACTTATATGTTAAAAGCTACATTGTGACATGGGAGATTTCAGTGATG
AAAAACCGGAAGTGCGAAATCTGCAGTTGGCAACTTGATTAAGGAGAACT
TTCTAGA
2447 LIPMUSC-RS674110

(SEQ ID NO:25)

CAGGGCACCCAGAACATTCACTTCACTTGGCATCAGTATTTTGAGGGACA
CCCCCACCACCGCCCACCTTTGTTGGTTCTTGAGCAGGGGAAATAGGACT
ATGAAATAAAGGGAGGCGATTCTAGCCAATGCATACAGGTCTTCCTACCA
CTGAGATGCTCAAAGGTCTAGAGCAAGGAGTTGGGGGGGGCTCCCGTGGA
GACAGAGAGGGCATAGCCTCAAGACTCATTGCTTGGTCGTAACCCTAGAG
CCTTGGATACAGACCCTAAGCTGTCCAAAAGGGATCTCAAGCCTGCCTGT
GGACACCCTGGAGGGACCCCCAATCCTCCCATACCTATGGGCCAGGCATG
ACCCAGGGCCAGGTCTGTAAATGTCTACACTTTTCACTGGAAGGAGCTAA
CCCTGAGCACAGTGGACATCCCTGTGCAAAGATCAGGA(C/T)GGAAGCA
AGGCTGTCCCCAGCCAGAACAAACACCTGCTCCCCCAGCGTCCCCTTGCC
TATTTTCCCACCCTCCTTCTCACGCTGTTCCCTGGCTGCTCAGGAAAGTC
TGGCCCTGGGTAAAAGTCTCCATTCACACCCTTATCCCTCTCCCCTATCT
GGTCAGAATCTGGGGAACCCTACAAAACCATAATATACTTCCCACAGGGA
TCCCCTACCCTGAAGGAAATAACTCCAGATCTCAAGTGTTTTTCTCCACC
CAACTGGCCTGTCTTGGTGCCTGGAATTTCAGCTTCCTCCCTGCTGTATC
AGATTCCCTGGGAACAAAGTTCTCCTGGAAGTGGGGTGGCCTATGGCTAC
CGTCTGACACCAGCCTAGTGGAGAAAGAGGGTTCAATGAGCTAAAAGGGC
TCCCCACCACCTCCTCTGAGCCATCACACACCCCCACATTGTGCTAGAGT
CTCTGCCAATACCCCCAGCCAGCGCTCAGCTGGCCGC
2392 LIPMUSC-RS717007

(SEQ ID NO:26)

TTGTTTCCATACTTTCAAAAACACTATTTTGTTTACCAATTATCAAGCAT
TTGTTAAGTATCTATCCCAAGCTAAGTACTGTGCTATATTGGTCAGGTCA
GGCAACGCAGCACCTTAAAAGTTGAAGAGAAGCCTTTGGAACCATTATTC
ATTCATTCAATTGAATATGGTCAATTGGCATCATGAATCTAACAATTAGG
AATTGGGTAGCAATATGAAGGGTGTGTATGGGAAGGATCAGGTGGCAGGA
GAA(A/C)AGCAAGAAGACAGGATTGGGGTCATTTTCAGTCCTGGGCAAA
GAATTGAGCATGCAGACAAGATCAGTGGGGTCCTTCCTAGGTATTTATGA
ATCCCTGAATCTCAAACTGAATACCTTGTGTAGCAGAAGCGAGCGTACAC
AGACCCTAGCAGATACACATGTGAACCTGGGTAGTCCCTGAAGAACAGGA
CAGGGCTCAGCTGCAGGTACCGTGCACTATGACCCTGCCAGCCACACACA
TGGGCACTAACATTCTGAGCAGTCA
2455 LIPMUSC-RS967326

(SEQ ID NO:27)

AGTCTCCCAGCCTTGAACTTTCCATTTCAAGATAACCTTTCAGGCCTTAA
TGTAGTCTGAAGAGATATGTGTTCGTGGAATATTTAGCTTTCAAGAAACA
AATAGCATAGGAGGAAAAAAAGAAACCTCAATATTGGTAATTAAGAAANN
NNNNNNNNNNNNNNNNNNNNNNNNNNNNNNNNNNNNNNNNNNNNNNNNNN
NNNNNNNNNNNNNNNNNNNNNNNNNNNNNNNNNNNNNNNNNNNNGATTGA
AGATGATTCTTGCTGAGGCCTCTCCCAGCTCTAATAATAAGTCCAAATGA
ATAGTCTAGGAAACAATTAATCATTAGCATCTTTATAACAGCAGCACTAG
CCTCTTGAATATGTTGGGC(C/T)ACGTGACAAACATGGACAGAAAATCT
TGGCAAGCCCCTGCCCTGTCACTCCCAAATCAGCCTCTGTCACTTTACTC
TGTTTCAGTACAAGCAAATGTAATGTGAGGAACCTAGGGAAAGTCATGAG
AGCCTTTTGAATTAACTGAGTGTTACAACCGCCATTCTGTTCTGAAAATA
GGCTGAGGCTGAGTTCCTCTTGACACCTCATGCCTCTCTTCCCTCCCCAG
TCCTTCTTGGTATCC
179 CYP2D6_RS1058174

(SEQ ID NO:28)

GTCATCGGTGCTGAAGGATGAGGCCGTCTGGGAGAAGCCCTTCCGCTTCC
ACCCCGAACACTTCCTGGATGCCCAGGGCCACTTTGTGAAGCCGGAGGCC
TTCCTGCCTTTCTCAGCAGGTGCCTGTGGGGAGCCCGGCTCCCTGTCCCC
TTCCGTGGAGTCTTGCAGGGGTATCACCCAGGAGCCAGGCTCACTGACGC
CCCTCCCCTCCCCACAGGCCGCCGTGCATGCCTCGGGGAGCCCCTGGCCC
GCATGGAGCTCTTCCTCTTCTTCACCTCCCTGCTGCAGCACTTCAGCTTC
TCGGTGCCCACTGGACAGCCCCGGCCCAGCCACCATGGTGTCTTTGCTTT
CCTGGTGAGCCCATCCCCCTATGAGCTTTGTGCTGTGCCCCGCTAGAATG
GGGTACCTAGTCCCCAGCCTG(C/T)TCCCTAGCCAGAGGCTCTAATGTA
CAATAAAGCAATGTGGTAGTTCCAACTCGGGTCCCCTGCTCACGCCCTCG
TTGGGATCATCCTCCTCAGGGCAACCCCACCCCTGCCTCATTCCTGCTTA
CCCCACCGCCTGGCCGCATTTGAGACAGGGGTACGTTGAGGCTGAGCAGA
TGTCAGTTACCCTTGCCCATAATCCCATGTCCCCCACTGACCCAACTCTG
ACTGCCCAGATTGGTGACAAGGACTACATTGTCCTGGCATGTGGGGAAGG
GGCCAGAATGGGCTGACTAGAGGTGTCAGTCAGCCCTGGATGTGGTGGAG
AGGGCAGGACTCAGCCTGGAGGCCCATATTTCAGGCCTAACTCAGCCCAC
CCCACATCAGGGACAGCAGTCCTGCCAGCACCATCACAACAGTCACCTCC
CTTCATATATGACACCCCAAAACGGAAGACAAATCATGGCGTCAGGGAGC
TATATGCCAGGGCTACCTACCTCCCAGGGCTCAGTCGGCAGGTGCCAGAA
CGTTCCCTGGGAAGGCCCCATGGAAGCCCAGGACTGAGCCACCACCCTCA
GCCTCGTCACCTCACCACAGGACTGGCTACCTCTCTGGGCCCTC
391 CYP2C8_RS1934952

(SEQ ID NO:29)

CTTGCTTTTCACACCTGTGTTTTGTGTGCTAAGTCTCTGGCCATGGAATC
TCCTTCCTTTATTCTTTGATCTTTTATGTCTGCTTTATATTTGGCACTGT
AGATACCAACATGACAAGGACAGAGACCTTCCTTCAAGAATTCACATTTT
ACCACAATAGATAAATAAATACAGAATTACGATTCCTGGTAATCTGTGCT
TTAATGAAAGCATGAGTATGCTGTTGAGGAAAACCAGAGAGCATAGGATT
TGATTACTTGAGGGGATTGTAAAGAGTGTGAAGATGAAATGAAATTGAAC
CTATGTCCTGAATGTAGCCTAATAAAGATGTATCTTAGCCAAAATGAACA
ACAGGATATGAAACTTGAAACTTCATGGTGTGTTCAAGATTGATGAAGAG
AGTGTATGACCAGAGCTGA(A/G)AACAGATTATGTGAAAAGTGGAAGGA
AAAGTCATGGAATATCAGGCTTGGAACAGGAAACAAGAATGTGCATGTAT
TTCCATAATGACAGATGGAAACTCAAAATGGCAAAAGAGCTGTTTTAATG
TGGGAATAAATAA
2689 HMGCR_41344_712043

(SEQ ID NO:30)

AACAAAAGGCCTCTCTGAACAAATAGCCTGCGGAGATAAATACAGTGATT
TGTTTTCCTGATAGAACTATTTAGCATGTTTAACACATTATTCTGTAGTT
TGGGAATAAGAGTGTTTCTTCCCTTGAAGAAAACAGGTCCCCTTCTGAAG
AATAATGCTGATTACCCCCCAAAATCAAAATAGACCAGCACCAAATGAAG
TATTAATTTACAAACATGAACTTAGAACTTAGCTCTTACTTCTTGAAGTT
CTACATCCCAGACTTAATAAATTAACTACAAAATCAGGAGTTTCATCAGC
TACAGTATAATTTAAAAATCCATTTTCAACTGGCAGGRGTGAGGGAGAAG
GTCAATTGCACTGATCACCATGAACTTCAAGAATTTCATCAAAACTTTTT
TCCCAGCTTATATTTGCCTTCAGAGGTGAGCTGTAGATTACCATCTCTGA
TGCTTTAACATACAATATTCTTGTTGAAATCTCTTCAAAGAGCACAGCAT
GTAAAGCACTAAACTGTGTTCAGATCTGAGGAGTCTGCATGGAAAGAACC
TGAGACCTCTCTGAAAGAGCCAAAAACCAAGTGGCTGTCTCAGTGATCAC
ATCTATTCATCCTCCACAAGACAATGCATTGAGCTTTTTTAATTCACAGA
TTTTATGTTAGTCCTTTAGAACCCAATGCCCATGTTCCAGTTCAGAACTG
T(C/T)GGGCTATTCAGGCTGTCTTCTTGGTGCAAGCTCCTTGGAGGTCT
TGTAAATTGATCTTCGACCTATGGTAGAAAATGACAAAGTAGCAATATAT
AAATATCAGGAGTGTAGAATTTTAACTTGGAACTACAGTAGATGAATAGT
AAGTTTTTACACTGCATATTTTTTGAAGTATAGGGGGAACATGTTAAATA
TATCTTTGAGTCTTACCTGTTGTGAATCATGTGACTTTTGACAAGATGTC
CTGCTGCCAATGCTGCCATAAGTGACAATTCCCCAGCCATTACGGTCCCA
CACACAATTCGGGCAAGCTGCCGGGCATTTTCCCCAGGATTATCTTTGCA
TGCTCCTTGAACACCTAGCATCTGTAGCCAGGGAGAGACACAACAAGATT
CACCCTTAAAATCATGACCAATTTCTTACTAAATCAACTAAAAACAGGGC
AACTGTAATGGCATCAGAATAGAACTAGACTCCACTGGAAGCACTAACTT
TCCAAGACTTGACAGCCACACCTGACAGTGCATAATACCATAGCTAACAT
AATATTCACAGCCTGACTGGCAGTACCCTTAACTCAGTAGATGAACATTC
ATTTGCTCTCTTCATCTACTTTCTTATCTAAGCATAAGCTTAAACATGCT
TATTTGGACACAATGGATTAGGCTGATATGACAAAAGAGTTTGGAAAAGA
CCAATTAAAATAGAGGTGAGTGATACATAGTCTCAGATAGAAAGAGAAAC
CCAGAGAGTCAGAACTAGGCTTGTGGACTCTATGCCTGATACATCATACC
TG
2760 CYP2C8_2185571

(SEQ ID NO:31)

TTAGGACCTATAGATGTGAATTTGGGCACCCTTTCCATTTATGTTCACTA
GTCACTTGGTTACAGCAATTTCATTTTAGAGATTCCTTCACCGAATAAAA
GCCTTTTTAATAATTTCTTTACCTGTAAAATTACAGATTTGGCCTAACTT
ATGGTCAAATTTAAAACTTTATTAAAACATACTTATCTTGATGACTATAC
TGAATAATATCCCAGAATCCACAAGAGTAGTTTTGCCCAAATGAATTAAA
TTTGGAAGATGATTGGAAATGATAAACATTATTTCCAAAGGAAGGAAATT
CATTTTTTACAAATTGAAAAAATAAATAAAAAGATTCCATTTATCAATTT
ACTTTTTGGTTAGCTTTACTGGGATTTAGATTTGAAATAAAAAGTTAGCA
TTTTACTTATTTAGATAAACAAATCTGTTATACTTAATGCTCATTTATAT
TAGTTTTTCTTCTCATATCATATGGATGTACTTGCTTTTCACATTTGTTC
CCTAAAACACATGAATTCACCCACAATCTCCCTAACTTTATTCCCATTGG
TTCAGCACATTATACTTTCAGCTATATGACATTTCTAGGTCCCCAACTTT
TCTCTTCCTATCTCTGTGTTTTATTGTCCAGAGGCTTTGCAAACAGACAT
GATTCTGCTCTAAAAACTTGAATTATTAGGATTTCAAAAAAGTCTTCTTT
TTCCTTCCAAAATAAAAGACACTTGG(A/G)GTTAAAAGAGTTTAAATAA
AGGCAGTGGATGTGAATAACCACATGCGAAATGACATTGTTTAGCTAGCC
TGTAATGCTCAACTCATATTTAAGGTAAAAGTAATGTGTTTATTTCATCC
ATGCTGATTTTTTTTGGACACATGGGGAATTTGTAAGATATTGTTTAAAA
TTTCTAAATTTCCTTTATGTCTTAACAAATGCAAATC
381 CYP2C9RS2253635

(SEQ ID NO:32)

CTCACAGCAGTACTCCTAAAATTAGATGGCTATAGGATTATACAAATCAC
CTTAATTCTTAACCCCCTAACAGAGTTTATAGCTTATTCCTCCTTCTTAC
TATCCTTTTGAGAAATAATCATAACAAGCTCCTTTTGTCTGTGCCAAACT
GATCTAAAATCACTCATTACTTTTCCATAAGCCACATGGCACTTGTTATC
(A/G)TAGCTTTTCTCATTCAAACCCCCTGAAGTTTTACCAGTGCAACTT
CCCTAATAACTGCCCACAGACTAACCTCATCCCTATTATTCTGCCTTGCA
AACTCAAACTACAAACGAGTTCACAGCCAAACCATACTACTAACACAAGG
CCTTCAAACACTTCTCTCCCTGATAGCCATGTGATGACTCCTAGCTAGTC
TTGCC
362 CYP2C8_2071426

(SEQ ID NO:33)

TTTGTCTTTCTAAGTCTGTCATTGTCAGAAATAGCGGAGTGAGTTGATGC
ATTTTGTGAATACAGAAACATTGGGGTCATTGTATTATATAATCATTTAA
TACAGTGGCAAAAGTTTAAAGTGCTGTTTCTCCTCTTTGTTTCACAGTGT
TTTGCTATGATTTTTGACTGAAGGTGAAGGGAAGTGTGTGTGATTAGAAA
TTTCATCCA(A/G)TAAGTTCTCTACTATAGTAGTCATGTGTTTTATTCA
GAATGGTCATGAAAATTGAACTTCTCTGAAGATTCATTTGATGGCTGATG
TGAAATAAATATCTGTGGGTTCAGGGCAAACATAAGTGCATGAAAGAAAG
AAGTAATCAGTCAGGGCCCAATAGGTAGTTAACAGAATTCTTTTGGATTC
TGAAGAAAGCCACTGTCTGTGGCCAAGGTTGCTGGAGAATGGAAGAAATT
GTTCTTCCAGGAGATGCTGAATGTCCTGATTCTAACTTTGTGGTGCTTCA
TCGTTCCATATTGGTAATAC
58 GSTP1E2E4-5_419

(SEQ ID NO:34)

CCGGGCAAGGGGAGGGGGTGCTGGGCCTTAGGGGGCTGTGACTAGGATCG
GGGGACGCCCAAGCTCAGTGCCCCTCCCTGAGCCATGCCTCCCCCAACAG
CTATACGGGCAGCTCCCCAAGTTCCAGGACGGAGACCTCACCCTGTACCA
GTCCAATACCATCCTGCGTCACCTGGGCCGCACCCTTGGTGAGTCTTGAA
(A/C)CTCCAAGTCCAGGGCAGGCATGGGCAAGCCTCTGCCCCCGGAGCC
CTTTTGTTTAAATCAGCTGCCCCGCAGCCCTCTGGAGTGNNNNNNNNNNN
NNNNNNNNNNNNNNNNNNNNNNNNNNNNNNNNNNAGCCTGGGTGCCTGCA
ATCCTTGCCCTGTGCCAGGCTGCCTCCCAGGTGTCAGGTGAGCTCTGAGC
ACCTG
424 GSTP1E2E4-3_466

(SEQ ID NO:35)

AGGTGCTCAGAGCTCACCTGACACCTGGGAGGCAGCCTGGCACAGGGCAA
GGATTGCAGGCACCCAGGCTNNNNNNNNNNNNNNNNNNNNNNNNNNNNNN
NNNNNNNNNNNNNNNCACTCCAGAGGGCTGCGGGGCAGCTGATTTAAACA
AAAGGGCTCCGGGGGCAGAGGCTTGCCCATGCCTGCCCTGGACTTGGAG
(G/T)TTCAAGACTCACCAAGGGTGCGGCCCAGGTGACGCAGGATGGTAT
TGGACTGGTACAGGGTGAGGTCTCCGTCCTGGAACTTGGGGAGCTGCCCG
TATAGCTGTTGGGGGAGGCATGGCTCAGGGAGGGGCACTGAGCTTGGGCG
TCCCCCGATCCTAGTCACAGCCCCCTAAGGCCCAGCACCCCCTCCCCTTG
CCCG
216 CYP2C19E7-5_169

(SEQ ID NO:36)

CACTATAATTTAAATTTATTATGATGTTTGGATACCTTCATCATGATTCA
TGTACCCCTGAATTGCTAGAACAAATGTTCCATTTCTCTCCTTTTCCATC
AGTTCTTACTTGTGTCTTGTCAGCTAAAGTCCAGGAAGAGATTGAACGTG
T(C/T)GTTGGCAGAAACCGGAGCCCCTGCATGCAGGACAGGGGCCACAT
GCCCTACACAGATGCTGTGGTGCACGAGGTCCAGAGATACATCGACCTCA
TCCCCACCAGCCTGCCCCATGCAGTGACCTGTGACGTTAAATTCAGAAAC
TACCTCATTCCCAAGGTAAGTTTGTTTCTCCTACACTGCAACTCCATGTT
CTTTTA
374 CYP2C8_RS1934953

(SEQ ID NO:37)

CTTGCTTTTCACACCTGTGTTTTGTGTGCTAAGTCTCTGGCCATGGAATC
TCCTTCCTTTATTCTTTGATCTTTTATGTCTGCTTTATATTTGGCACTGT
AGATACCAACATGACAAGGACAGAGACCTTCCTTCAAGAATTCACATTTT
ACCACAATAGATAAATAAATACAGAATTACGATTCCTGGTAATCTGTGCT
TTAATGAAAGCATGAGTATGCTGTTGAGGAAAACCAGAGAGCATAGGATT
TGATTACTTGAGGGGATTGTAAAGAGTGTGAAGATGAAATGAAATTGAAC
CTATGTCCTGAATGTAGCCTAATAAAGATGTATCTTAGCCAAAATGAACA
ACAGGATATGAAACTTGAAACTTCATGGTGTGTTCAAGATTGATGAAGAG
AGTGTATGACCAGAGCTGAGAACAGATTATGTGAAAAGTGGAAGGAAAA
(A/G)TCATGGAATATCAGGCTTCGAACAGGAAACAAGAATGTGCATGTA
TTTCCATAATGACAGATGGAAACTCAAAATGGCAAAAGAGCTGTTTTAAT
GTGGGAATAAATAA
172 CYP2D6_RS2267446

(SEQ ID NO:38)

TGTGCGGGAGGACGGGGACAGCATTCAGCACCTACACCAGACAGAACGGG
GTCTCAATCC(C/T)TCCTGTGCTCTGCGTTCATCTGGACCAGTCTCAGG
CCCCAGCCATCTCCAGGAAGACCCA
369 CYP2C8_RS1891071

(SEQ ID NO:39)

TAATCTGTCTAAATTTGATGACACAATTTAAAATGACATCTTTGTACAAT
GGAGGAGGATGACAGAGATCAGTA(A/G)AAACAGTATGGCAGTAGCAAA
ATAAGTAAAGCACTGATGAAGTGTCTGGATTTCAGCAAAGGTAATTTGTG
GTAAGGAGAGCCAGCATAAATTGCCCTAGTATTGAATGTTGGTTTTATTA
TGAAAAGTCCACTTTGAACAGTAGGTTCATTTCTCATTTTAAAAATTCCA
TGCTCTAATGCTGTGGTGGGGAGATGAAAACAATCTTTATTGAAGCATAA
GTGGAAATTCTAGAATTGTACTGAGGCATCCTGACATAAATTCCAGTCTG
GGAAGTAATCTAAAAGTTAGTCTCTTACAAAGGTGTTTCTATTTAAGCAG
AGGCCATACCTAAAGGAATTTTATTATTCTAGGAGTGTGTTTCATAAAAA
TGCTATTTGACCAAATAGGGACATTTGGAAGGGGGTTTAATAATTGCATC
TTTCACATACAACTTTTCTTTAGAATTTACAATTTACCCTTAGAGTAAAC
TCTACATTTCCTTAGAATTTACATTTAAATAGTTCCTGCTTTGCAGCAGA
TAACATACCTTTTTCCCTGTGTCAGGATCCCACTG
282 CYP2C8E8_296

(SEQ ID NO:40)

ATTTCCTAATCCAAATATCTTTGACCCTGGCCACTTTCTAGATAAGAATG
GCAACTTTAAGAAAAGTGACTACTTCATGCCTTTCTCAGCAGGTAATAGA
AACTCGTTTCCATTTGTATTTAAAGGAAAGAGAGAACTTTTTGGAATTAG
TTGGAATTTACATGGCACCTCCTCTGGGGCTGGTAGAATTGCTATTT(A/
G)TCCATGATCAAGAGCACCACTCTTAACACCCATGTGCTCCACCCTCAC
AATACACCATCATTATTGGGCCAGATAGAAGGGCGAATTCGTTTAAACCT
GCAGGACTAG
225 CYP2C8_RS1891073

(SEQ ID NO:41)

TGAGATATGGACTCCTGCTCCTGCTGAAGCACCCAGAGGTCACAGGTAGG
ACCACAGATGATGAACAAAGTGAATTTCAGAACAATGCTGAGAAGATGGT
GCCAGTATCCTCCACCTTGTTTCTCTCAGAGAAGGCTCATTCTTTAAATT
TCTGTGTCATCAGCTGTAATCTGTCTAAATTTGATGACACAATTTAAAAT
GACATCTTTGTACAATGGAGGAGGATGACAGAGATCAGTAGAAACAGTAT
GGCAGTAGCAAAATAAGTAAAGCACTGATGAAGTGTCTGGATTTCAGCAA
AGGTAATTTGTGGTAAGGAGAGCCAGCATAAATTGCCCTAGTATTGAATG
TTGGTTTTATTATGAAAAGTCCACTTTGAACAGTAGGTTCATTTCTCATT
TTAAAAATTCCATGCTCTAATGCTGTGGTGGGGAGATGAAAACAATCTTT
ATTGAAGCATAAGTGGAAATTCTAGAATTGTACTGAGGCATCCTGACATA
AATTCCAGTCTGGGAAGTAATCTAAAAGTTAGTCTCTTACAAAGGTGTTT
CTATTTAAGCAGAGGCCATACCTAAAGGAATTTTATTATTCTAGGAGTGT
GTTTCATAAAAATGCTATTTGACCAAATAGGGACATTTGGAAGGGGGTTT
AATAATTGCATCTTTCACATACAACTTTTCTTTAGAATTTACAATTTACC
(C/T)TTAGAGTAAACTCTACATTTCCTTAGAATTTACATTTAAATAGTT
CCTGCTTTGCAGCAGATAACATACCTTTTTCCCTGTGTCAGGATCCCACT
GAAATTTCAATAACTAAATTACAAATTAAAATTATCCTGCTGAAGTGAAA
AGAGAGGAGAATAGAAAATAGCCAATAAGTCTTTGGCAAATTTCTAAAAC
ATGGAGAGACAATGGAGGGCTGACAATTGACACAGCATAGAGGATGGAGT
TGTAAGTATTAGCAGAGGAAGATTTATCAAGAGGAGAAGCTAATCTGTGT
CACTGTGATTCTCATAAGGTTCAGTATTTGGAGGCACCAAGAGCCAAAGA
CAGTAGGGAATGAGACTGAAAAGGGAGGCTCTCCTGCCCAAGTTTCCTCC
ATAACTCCTTTTATCAGGTACCTGATTTTTTCCCACTGGGAAAGGGAAGC
ATACTCTCCAGAGAGACTGAGCCTAAGAACCCCTGTACTCGGCGACACTT
TACAGGGCCAGGAAACTGTGAGATGTGAAGACAGAAAAAAAAAAGGTTTG
AGAAAGATCTATTCCTCAGATTCAAAGACTCAGCATTTTTCTTCATCTTG
CTTCCTGACATTCAGCAGCCAGCTAGATACTCTCCAGAGAAGAAACAAGT
CTGGAGAAAAGACCTCCGTATTTTGCCAACTTAATAGAAAGTTATCTATA
2680 HMGCRE711_635_756249

(SEQ ID NO:42)

AGATAATTGTACCTACCTCTCAAGGTTGTGTGAAATAAAGAAAGAAGATA
GTATCTGTTAGTCATGTTACACCGTGCCCAGAACTTAGCTGTAGTGTTCA
GCAGATACTAGATTTTTCTTCCTTGAAAAAGCTCCTTTGTAATGAAAAAT
GCCACATTGGAGTTTATGTTATCATCCTCACCTCTGCATTCCCAAGTATC
TGTAGACATTCTTCATTAGGCCGAGGTTCCCTGGGAAGTTCAATTTCAGG
TTCCTGTGTCACCAGTACTGATGAAGTATCGAGTAAGGAGGAGTTACCAA
CCACAAATGTAGCTCTGTTTGGGGTATCTGTTTCAGCCACTAAGGGTTTT
ATAACCTCAACTGTTCAAGAAATCAAAAGAAATCTCACAACACGGCACAT
AATTTTGAAAACAGACTACTTTTTGACAAAGCAATGAAGGATTGAAAGCG
AAGAGAATAACAAGTTACCTTTTCTTTCTCGGTTTATCCCTGTCTCTTCC
TCTACTGAATCACATTTCTGGTTATTTCTGACCAGCATAGGTTCACGTCT
ACAACAATTGTCTGGGACTTTCTTTTGTGTCACTACAGGAGATGTGATAG
GGTTTTTTAATGAGAGTGTAGATTCTGTCTCTGTTTGTTCAAAGAAGATG
TACTTGACAGCCAGAAGGAGAGCTAAACTTAGGGTAATAACTTGTTCAAT
ATCCATGCTGATCATTCTAAATAAAAGAAA(A/G)CAAATTAAAATCTTA
TTCAGAAATGTAAAGGACACAATCTAAACTTACATTAGCATAGAGTGTTA
TGATTAATATATCACAAAGTAGATTTCAATTAACTTACTTAGAGAGATAA
AACTGCCAGAGGGAAACACTTGGTTCAATTCTCTTGGACACATTTTCATC
CAGTCCTAATGAAACCTTAGAAGTATCTGCTGTACTGTTTTGAGGAGAAG
GATCAGCTATCCAGCGACTGTGAGCATGAACAAGAACCAAGCCTAGAGAC
TGAAATAAAATTTTTAAAGTAATGTATCCTCTGCATATCAATAGAACTTA
AATTTCTTATCCCTAGCAACTGGACAGCCAGACATTATCTCTCATAGCTT
CCCCTTACCATGAAAAAAAAAAAGCCCCAAGCTTGCTATGCAACTAACTA
AAGTAGTGACCCCACTGAACTACTGAAAACACCCCAAAGAACAGGCTTTC
AACGAGAGATAAGGTGGGGGAACTTAAAAAGTCTGTTTAGGAGAGAGGGG
CTAATAAAGACCAGGAGCCTCAAAGAAATGAACACATTAAGAAAAAAAGG
AAGAAGGGGGTGCAATATCATTGAATGGGCCAAAATTGTAGAAAAAAAGA
AATCTTAWAAATAATGAGATTGGAACTGAGGATACTAAAAGAAGAAGAAA
ACCATGTCATTACCATAATCATCTTGACCCTCTGAGTTACAGGATTCGGC
TTATTTTCTTCTTCTTCTAAAACTCGGGCAAAATGGCTGAGCTGCCAAAT
TGGACGACCCTCGCGGCTTTCCCGAGAAAGCTACAAATTAAGTC
98 CYP1A2E7_405

(SEQ ID NO:43)

CTAGAGTATACCAGTCCACTCCAGGGAAGATTGGAGCTGAGGCTGCTTGA
GGGCTATACACACTCTGGGAACTAGGGGGTCTCCAAACCCTTGAGAGGTT
TGCAGGAGGAAAACTGCAAGGAGACTGGCAGAAAGCAGGCTGAAGTGGAA
GCTTCCTGGCCCGTGCTGGGCTC(G/C)TCAGTGCTTGAGAACATAGATG
AAGGGCAGACAGTGGCCGCAGACGAGGGACGCTGTGAGGAGGAGGCCTGG
CATGTCTTGGGGCCAGGAAGAGCTCCCTGATCATTTTTTCCTTCAGGATG
GGTAGGCTCTTGGTCTGACTGCCCGGAAAACAGGTGATGGAAGGACCAAG
GACTACAAAGGTCAGGAC
188 CYP2B6RS1042389

(SEQ ID NO:44)

AGACCACAGTCACACACTGCTGTAGTCTTCCCCAGTCCTCATTCCCAGCT
GCCTC(C/T)TCCTACTGCTTCCGTCTATCAAAAAGCCCCCTTGGCCCAG
GTTCCCTGAGCTGTGGGATTCTGCACTGGTGCTTTGGATTCCCTGATATG
TTCCTTCAAATCTGCTGAGAATTAAATAAACATCTCTAAAGCCTGACCTC
CCCACGTCAAGAGGTGATCTGTGCCATTTTGTGTGTGATTCTTTTATTGT
CGGGTCTCTAGGGATTTTTCTGGAAGGAA
2657 HMGCRE5E6_283_809125

(SEQ ID NO:45)

TACCCTGGGTTTCTCTTCCATTAGATCTTGTTCTGCTCTCTGATGTGTTT
CACTAGGAAAATACTCTTATTTACCCAAAAATTATTATTACCATAAGTTC
TGAAAACTTTCAAAAAGAAAAATGGGGGYAATTCCAAATTCCAGTAGCTA
CAGAATCATAATTGAGTTGTTAGATACAGGGGACTGTTCCTGGGGCACTT
ATGGAGACCAGTCTTGGGACTTRAGAATTAAACTTAAAACTTTGGGCAAT
TCTTAAATCTTGTGCTATGAAGAAA(C/T)GCTATTAATCCTTCCTATTA
ATGTAAACTGAAAAAAGGAATACTATTCACATTCCTATCTTATAAATAAT
ACTTACCTGTGAGTTGGAACTGAGGGCAAACTTTGCTAATGTGCTTGCTC
TGGAAAGGTCAATCAAAAGTAGGAAAAAGGGCAAAGCTTCACTGGAAAAG
AACAAAATGATCAGATAAATTTAACGGGAAAAAGTATGATTTNNNNNNNN
NNNNNNNNNNNNNNNNACCTTTCCCCCTCCATACTGTATGATCCTGTAGT
ATGTGTACCTTTCTGCAGACAAAAAAGTATACCCTATATTTCTTTGGCAT
CCTCAAAGCTAAACATAGTAGTTGCTC

### Zocor® Study

[0119] A set of 205 xenobiotic metabolism SNPs, including SNPs in the AHR (SEQ ID NO: 125), CYP1A2 (SEQ ID NO: 127), CYP2B6 (SEQ ID NO: 130), CYP2C8 (SEQ ID NO: 131), CYP2C9 (SEQ ID NO: 132), CYP2D6 (SEQ ID NO: 134), CYP3A4 (SEQ ID NO: 136), CYP3A5 (SEQ ID NO: 137), GSTM1 (SEQ ID NO: 141), GSTM3 (SEQ ID NO: 141), HMGCR (SEQ ID NO: 143), MVK (SEQ ID NO: 144), PON1 (SEQ ID NO: 145), PON3 (SEQ ID NO: 146), CYP1A1 (SEQ ID NO: 126), CYP2C19 (SEQ ID NO: 133), CYP3A4 (SEQ ID NO: 136), CYP3A7 (SEQ ID NO: 138), CYP2E1 (SEQ ID NO: 135), CYP1B1 (SEQ ID NO: 128), CYP2A6 (SEQ ID NO: 129), CYP4B11 (SEQ ID NO: 139), and GSTP1 (SEQ ID NO: 142), was screened as described above and in PCT International Publ. No. WO 03/002721 (published Jan. 9, 2003) and U.S. patent application Ser. No. 10/188,359 (published Nov. 20, 2003 as U.S. Patent Publication No. 20030215819 A1), the entire contents of which are incorporated herein by reference. The top SNPs, ranked by delta value are shown in Table 1 (“ZOCORDELTA”). As shown in Table 4, four of the genes screened —CYP2B6, CYP2D6, CYP2C8, CYP3A7 and CYP3A4-showed multiple hits, indicating that the results obtained are not random with respect to gene level of analysis

TABLE 4
ZOCORDELTA

| Sample size | Delta | Marker | |
|---|---|---|---|
| 32 | 0.229167 | 2663 | GSTM1PE1_287_TC |
| 66 | 0.155303 | 324 | CYP2B6RS2279343_GA |
| 68 | 0.145469 | 2672 | CYP2D6_RS2004511_GA |
| 70 | 0.140336 | 65 | CYP1A1_RS2606345_CA |
| 70 | 0.131746 | 225 | CYP2C8_RS1891073_TC |
| 70 | 0.131746 | 249 | CYP2C8_RS1891072_TC |
| 66 | 0.129234 | 74 | CYP2E1RS915907_CA |
| 62 | 0.129032 | 134 | CYP2C8E2E3_397_TC |
| 70 | 0.127027 | 373 | CYP2B6RS2014141_GA |
| 68 | 0.12437 | 172 | CYP2D6_RS2267446_TC |
| 68 | 0.123162 | 179 | CYP2D6_RS1058174_TC |
| 68 | 0.11683 | 2739 | CYP2B6RS1038376_TA |
| 68 | 0.108824 | 93 | CYP2D6_RS2267444_GC |
| 66 | 0.107323 | 98 | CYP1A2E7_405_GC |
| 70 | 0.106767 | 108 | CYP3A7RS2037499_GC |
| 70 | 0.105405 | 2665 | 3A4E10-5_292_712037_GA |
| 70 | 0.104633 | 178 | CYP3A7RS2740562_TC |
| 70 | 0.104633 | 263 | CYP3A7RS2687077_GA |
| 70 | 0.102381 | 96 | CYP3A4_RS2257401_GC |
| 70 | 0.102381 | 229 | CYP3A7RS2687075_TC |
| 70 | 0.102381 | 233 | CYP3A7RS2687076_TC |
| 70 | 0.102381 | 364 | CYP3A7RS2687143_GA |
| 70 | 0.101587 | 381 | CYP2C9RS2253635_GA |

[0120] A similar screen of 10,000 SNPs on an Affymetrix DNA chip revealed several other markers associated with adverse muscle reactions to Zocor® (Table 5-AFFYZOCMUSC).

TABLE 5
AFFYZOCMUSC

| | | | | | SNP | | |
|---|---|---|---|---|---|---|---|
| Sample | | | | | consortium | | |
| size | Delta | Marker | Ranked | Chip location | number | Chromosome | base |
| 70 | 0.21627 | 2528 | 1q41 | SNP_A-1510124 | tsc0613997 | 1 | 215,903,182 |
| 70 | 0.213866 | 2517 | 3q27.1 | SNP_A-1509249 | tsc0567070 | 3 | 179,628,143 |
| 70 | 0.171429 | 2523 | 3q25.31 | SNP_A-1513026 | tsc0687812 | 3 | 154,154,665 |
| 68 | 0.162582 | 2526 | 1q22 | SNP_A-1515668 | tsc0047460 | 1 | 152,609,682 |
| 62 | 0.16129 | 2539 | 2p12 | SNP_A-1518723 | tsc0040825 | 2 | 81,733,501 |
| 66 | 0.160873 | 2531 | 9q21.12 | SNP_A-1512095 | tsc1337987 | 9 | 64,218,007 |
| 70 | 0.153668 | 2553 | 6q22.31 | SNP_A-1512342 | tsc1732532 | 6 | 124,421,010 |
| 70 | 0.148413 | 2492 | 4q26 | SNP_A-1509632 | tsc0148687 | 4 | 115,627,058 |
| 68 | 0.139076 | 2511 | 11q14.1 | SNP_A-1513472 | tsc1019659 | 11 | 83,558,478 |
| 70 | 0.128571 | 2520 | 3q25.32 | SNP_A-1507515 | tsc0537907 | 3 | 154,253,501 |
| 56 | 0.125 | 2560 | 5p14.3 | SNP_A-1512670 | tsc0960625 | 5 | 19,861,868 |
| 68 | 0.117201 | 2514 | 21q21.1 | SNP_A-1515706 | tsc0908733 | 21 | 15,438,463 |
| 70 | 0.114286 | 2510 | 5q14.3 | SNP_A-1509310 | tsc0892782 | 5 | 88,403,677 |
| 54 | 0.111111 | 2559 | 4q28.3 | SNP_A-1516638 | tsc0049339 | 4 | 138,455,040 |
| 70 | 0.107143 | 2487 | 11p11.2 | SNP_A-1511438 | tsc0584089 | 11 | 47,664,524 |
| 70 | 0.104633 | 2495 | 2q31.1 | SNP_A-1518568 | tsc0052126 | 2 | 170,563,807 |
| 60 | 0.101515 | 2508 | 10p12.1 | SNP_A-1510527 | tsc0990991 | 10 | 23,715,597 |
| 70 | 0.095238 | 2563 | 9q31.3 | SNP_A-1519460 | tsc0061585 | 9 | 104,492,937 |
| 70 | 0.090734 | 2536 | 13q21.33 | SNP_A-1518231 | tsc0062893 | 13 | 68,267,940 |
| 70 | 0.089683 | 2481 | Xq28 | SNP_A-1517959 | tsc0135188 | X | 145,805,851 |
| 70 | 0.088417 | 2497 | 8p23.2 | SNP_A-1512899 | tsc0630147 | 8 | 5,942,321 |
| 68 | 0.088235 | 2524 | 18q12.2 | SNP_A-1512182 | tsc0492500 | 18 | 37,336,684 |
| 68 | 0.088235 | 2529 | 6q26 | SNP_A-1508303 | tsc0041887 | 6 | 161,240,925 |
| 70 | 0.087302 | 2490 | 11q22.1 | SNP_A-1509996 | tsc0537095 | 11 | 104,305,856 |
| 70 | 0.083482 | 2515 | 6q16.1 | SNP_A-1516226 | tsc0597593 | 6 | 93,798,560 |
| 70 | 0.080952 | 2479 | 15q12 | SNP_A-1514222 | tsc0043313 | 15 | 18,492,700 |
| 70 | 0.076984 | 2568 | 21q22.11 | SNP_A-1512179 | tsc0053101 | 21 | 29,102,747 |
| 70 | 0.076834 | 2504 | 9q31.3 | SNP_A-1508581 | tsc0465012 | 9 | 105,199,194 |

[0121] The above identified SNPs were used to make classifications of patients receiving Zocor®. Genotypes were determined from a sample (e.g. blood) from patients suffering muscle adverse effects (case) and from patients not suffering muscle adverse effects (controls). Genotypes were selected for which the prevalence between cases and controls was more extreme than 63%:37%, or 37%:63% (giving a risk of non-response in terms of classification theory of about 3). As shown in Table 6, a Zocor® patient was classified into the non-adverse response (muscle reaction) group with 97% accuracy, and 97% of the cases (individuals exhibiting muscle reactions) were properly classified. Representative portions of several of the genes, including the SNP position, used to obtain this classification performance are listed below (SNPs indicated in parentheses; SEQ ID NOS:28, 32, 38, 41, 43, and 46-90; “Marker” numbers also indicated, below—compare Tables 4 and 5

TABLE 6
0.33 CUTOFF WITH BGA RULES +5 if >9% EAS or >15% NAM
COLUMN BQ NO INCONCLUSIVES

CLASSIFIED INTO

| | CASE | CONTROL | sensitivity |
|---|---|---|---|
| CASE | 35 | 1 | 0.972222 |
| CONTROL | 7 | 28 | 0.8 |
| accuracy | 0.833333 | 0.965517 | |
| efficiency | | | 0.887324 |

2528 ZOCMUSC-RS1416527

(SEQ ID NO:46)

GAGGGTCTTCCTACCCAGGTGGAGTCTGTCTTTGAGCCTGTTAACTCACT
ATCCCAGTTTATAAGCAGCCCTTTTTTATGGTAGGCCCCACGTGGTTGGG
TAACCTAACTGATGTGATAATGAGGACAGACTAAAGGTCACGAGATTGTT
AACA(C/T)GTGTGAGGAGATTGTAGGCTTAGCCTATCAGGTGAGGGAAA
GGTTAGCGTACCAACTGTCTCCACACTTCAAAGCATGTAGCTAGTTTGCT
GCACTAACTTAATTATCTGTGCTATTGATATCTTTGAGGAACATATCTAT
ACCCTGGATACAGTTACTTCACAGTAGGAGATAGCAGGAGGTGGCTTGTT
CGGTTGCCAACTTCCTAAAATGCTTTTTAGAGTCAGCTGGGTTGCTTAGT
CCTCTCTTGCTCTTGGATTAAATATAAAAATAACTATGTAAAGCATATCA
GCCCTCTTTTCCCTGTCTGCTGAA
2517 ZOCMUSC-RS676290

(SEQ ID NO:47)

GAACTGAATTGGGGTGTAGAAGGGTAAGTTGAAAAGGGAGTTTCTATTTT
TTAATTGAGGTGATCCACAGTGTTCTCAGTTTTAAACATTCCTTAGAAAA
CCATTTACAAGTTAAGAGATGCAAAAATGGCAGAGCAACCCAAATCAAAA
CCTGAAATTGAATTACTTTTAGAGGTTTCAAATATAGTCATTAGAGAAAC
TTAACAATACTAATCTTGACCACATTATAGCTCATTTGTGTATTAGTGGA
TAAAATGTTGATTCA(C/T)TATACAATCAAAGGGTTCCATAAATAGAAA
CTGTTTTAGTAAGGTCATTGATACTGATACACTGAGCTCTAGATCCTACA
ATTCATTGAATAGCACCTACCACACAATAGCTTNNNNNNNNNNNNNNNNN
NNNNNNNNNNNNNNNNNNNNNNNNNNNNNNNNNNNNNNNNNNNNNNNNNN
NNNNNNAGAAAATGAGGCTGGGTGACTTGCTCCAGGTCACAGCC
2523 ZOCMUSC-RS1456108

(SEQ ID NO:48)

AAAGAAAAATAGGCACCTTGCATCTAATTATCTAATGAGTAAATTATGTC
ATGTAATGAGTAAATTATGGAAAGTTCAATTGTAGCTGATGTATAGTTCA
ACTGAGTTAAATCTTACCATATTGTTCCTTTTTCTAATGAGCTAAAAGCA
TATACTTTTTTCCTGGCAAAAAGTTCAAATACAATCAGCCT(C/T)TCTC
TTTTTATTTCTATTTTCTTTCTTTTTGGACCCATAATAGGCATCATTCTT
CAAAATGATTTCCATGATTGGGCCAGAAGGCCTGTGGTTACTTTTCTCTT
TCACTCGGAGATTGCACCTCATTTACTAAACAGATATTGTGTAATTAAAG
ATGGGCTGTTTCTTTGAGTTCTCTAGAAATTTTTCAATTCTAAAGTCCCC
AGTGGTCTTTCAAAAAGTTTGTTTAATTGAAGCAAAAGAAATAGTGGGGC
CATTGTTCAGGATTATCAGTGAGAGGTCATTTAC
2526 ZOCMUSC-RS951241

(SEQ ID NO:49)

CTGCTCCACCCTGAAAATGCCGAGTAACAAATGGGACTGGATTTGAACGG
TGTTGTTAAATAGCGCTTCACAAAGCACTCTCCCATGCGCTCNNNNNNNN
NNNNNNNNNNNNNNNNNNNNNNNNNNNNNNNNNNNNNNNNNNNNNNNNNN
NNNNNNNNNNNNNNNNNNNNNNNNNNNNNNNNNNNNNNNNNNNNNNNNNN
NNNNNNNNNNNNNNNNNNNNNNNNNNNNNNNNNNNNNNNNNNNNNNNNNN
NNNNNNNNCGTCAATCTCTCGCCTGCTGCCCAGATGTGAATCTATCTGTG
CTCCTCCAGCCAAAGGACCGGGATGGTTTCCAGATTCACATGCACATGAG
GAAAAACATCTGGATA(A/G)TTTAGAACTTCTCAGGTCCACAGCAGTGC
AGGTCAGCCTGAAGGGCCGGGGGCTGGGGGAAGCTCATTGTCACCAGAAG
ATGCTTCAGATCTGTTCTCTCCTGTCTGACCCTCCTGGCCCGGGTTGAAC
CATCCTCCCTATGTCAGCCAAACTGGAAGTGCACCCTGGAGGCCCAGCCA
ATGTTTCTCTGGGTACCAAGT
2539 ZOCMUSC-RS717810

(SEQ ID NO:50)

GGGAATCACACATAACCTTAAAGACAACCTCCGGGGACAGTGAGCCAGAA
AACATGCACACTACAGAGTCAGGAAACTTGAATTTATTCCCAATTCAACC
AGAAGAAAGCCAGGTAATTTCAATGAACCACTGAAACTATTTGGATAAGG
GTAAGAAGAAATTAATCTTCAAGAAATAAATAATAGAGGGAAACATGGAG
AAGAACAAATAGAGTGGTAGCGTGTTTTTAAAATGGAGAGCAGTCAATAC
TGCCCTTCTTTTCACAT(A/G)GTTAACCAATCAATCAAATTATCATTTT
TTCTAGATACAGGAAAATGTGAGAATTTTACTATTTTAATAAGTTATTGG
TCTCAGTCTTTTCCTCTCATTCACATCTGTATATTCTGAAAAATCATTTA
TTTGCATTTAGTTGGCTTGTAGAAAGAATGACTCTGTGTCTGTCCCCTCA
CTGTAACCTCATAACCTACCCCTAAGACATAAAATTGAAAAATA
2531 ZOCMUSC-RS2309741

(SEQ ID NO:51)

TGTCATTGACTTGTTATTATAAAAGTTTATGTATGAAAAACATTTCAACC
ATTGGAAGGCTGTGCTCCAAAACCCCCCACAACATCTATAGGGAGGGCTT
TCTTACTATCATCCATGTACTTTGGCAGAATTCTACCTGAACAACCTGTT
AATTTGTTCCAGAGCCCAATCATCTATTTCTACTTATTAATGCATAGTTA
ACACAAATAGCATTTCCAGGCTTCTGCCATGTGATGTGTCAATGTGACCC
CCATAAGTAAACCATAGAGAATCTGAATCTCCAAATGTTTGATCCCTTCT
AATTTGCCACTGCTGCATAGATGTAGCCTTCCCATTCTGTACCTGCA(C/
T)GTGACTTTGAGGCCCTACGACTTAATCTTAAGCTATGACCAGCTTCTA
GAATAAGTTTTCTTCACTTTAACTTTGGCCAGGTGCTTGGCCAAAGTTTC
CCAGCTGCATTAATCCTACAGGTTTGATAATAGGTCTAATCTGTGTCATT
AGTTTCTGAGTCAAAGATCCCACTTGGACAAAATTCGAGCTTTATCAGTA
TAGGCCCTTTACTTTATACTTTGGGGAAGAAGGGGAGCAGCATGGCCTCT
GGCTCCTGGCAATAATTCAACCTTGGTATCAGATCAGGTTTTACATCCCG
CATTGCTCCTTCCAATCTTTCCATGCCATTCCAAGACTCCAAATGCAGTC
TCTCAGCAATGAGGTGCCCAAAATATGAACATCTCTTATTACTGGCTTGT
GGACAAGGGCTAG
2553 ZOCMUSC-RS590944

(SEQ ID NO:52)

CCAAGGGACAAAGAAGTGTCCCGTTATATCTCAAAATCTAGGTTTTGCCC
AGTAACTTAGGACTTCTCATTCTAAGAGACTACGAAGCAAAGAGAGAAGT
CTGCATCCTGGAAGGGCTAAATGATATTGATCATTAGNNNNNNNNNNNNN
NNNNNNNNNNNNNNNNNNNNNNNNNNNNNNNNNNNNNNNNNNNNNNNNNN
NNNNNNNNNNNNNNNNNNNNNNNNNNNNNNNNNNNNNNNNNNNNNNNNNN
NNNNNNNNNNNNNNNNNNNNNNNNNNNNNNNNNNNNNNNNNNNNNNNNNN
NNNNNNNNNNNNNNNNNNNNNNNNNNNNNNNNNNNNNNNNNNNNNNNNNN
NNNNNNNNNNNNNNNNNNNNNNNNNNNNNNNNNNNNNNNNNNNNNNNNNN
NNNNNNNNNNNNNNNNNNNNNNNNNNNNNNNNNNNNNNNNNGCTTAAGTC
TATCCCATTAAACTTTTTCTTGCAACTTATGCCCAGGTAAAAGA(A/G)G
ACCAGTAGAATCTTGGAGCAGCTCTTCTATAACTTACTATATAAAGCAGG
AAGTGGACTATAGCGGATACTGTGGTGTGTCACCTAGATTCATCAGTCCT
ACCTCAGGACTGAGCACTCATTCTCCAGCTGCTTGCTTTGCTAGAAATTG
ANNNNNNNNNNNNNNNNNNNNNNNNNNNNNNNNNNNNNNNNNNNNNNNNN
NNNNNNNNNNNNNNNNNNNNNNNNNNNNNNNNNNNNNNNNNNNNNNNNNN
NNNNNNNNNNNNNNNNNNNNNNNNNNNNNNNNNNNNNNNNNNNNNNNNNA
TAGTTCTCTACCCAAATTTGCTTTTTAGGATCACCCTCAGGTGTTAATCC
TGAGAGTGTGCTCCAGTAAATTTCCTGCATAGAAATCTTCAGAGCAGGCT
TCCTGGAGACCCCTATCTGAGATGAGTCGAGAGAGGAAGGAGATAGACAA
GGAGATGAAGTGCGGGGACCAGAAGAAATATCATATTTTCTCATCATGT
2492 ZOCMUSC-RS4075882

(SEQ ID NO:53)

ATCCATTAGCTTCACAAGTAGCATGTGACCACAGTCCAACTATAACAATG
CAATGAATGATCAGTGACCAATCAGAACTTCTGTGAGAATTTGAAATTTG
GCTTTCAAAGAATGTAGATTCACAAGTCATGCAAATTTTTGTCAGGAATG
AAAGTTCTTTTTGTAGCAAGAAGTAGGCGACTTACTAAGAAAACAGAGTG
AGAAATAATTTGACTCTAGAGGGATGGAAAAAGTACTTGCCCTGATGGCT
TCACAATTCATGACTTCAACAAGGCTCAATT(G/C)TGCTTTTCCCTCAT
ATCCCTTCGAAACATTTCCTCTTTATTTGAATGGATTCCTGTTCCTTGTC
ACCAAAGAAACATCAATACTAATACTCTTGGTGATGCATTTACAAGGAGA
TCTAATGAAGCCCATGTATGCAGGATCATTTTAAAAAGACACTGTAGTTC
TATTTTGTTGGCACATAGATCCAATTTAAGTTCAGTGGCTCAAATTACAC
TGTTTAATTGCTTGAAAATCAGCAGAATTTGGTGGTACTTTCTTAGAGAT
TAACTCTTGGAGTTGAGTAGTATCCTCAAGACTTGTCAAAATATTACCAA
TAAGGTATTGAGATACTTTCATAAGATAACAAAGTGGCTCTAATGATAAT
TTCCCATTCCCAGTTGGCTTACATATTAAATACCAAAAGATAATTCTGAA
CTCGTGCACTTCTATTGCTCACACAGTCTTTTAAACTGAAAGCATGTCCA
ATTAAGGACATTAATGTTTATAAAGTTGAGATACATGTTTTAATACTGAT
TTAATAAAAATTTGTCACATCCTTATTACATGAGATCTCATTGCCACGAG
TAAATCTAGAGGTACATAATGCAGCCCAGTAAATAAGTGCATAGTGAAAT
AATGCGTCTGGCTTAGTACAAGTCAGCTTAGATCTTTTTA
2511 ZOCMUSC-RS1945650

(SEQ ID NO:54)

TCTTGAGATCCATATACCTTTAACAACATCAATAAAGTGGTTATTTGCAA
CTTCAGATATTAATGAAGATAATACTTTTTAAAAATAACTAAACCAGAAG
TTTGAAATATAATCCCACAAAACTNNNNNNNNNNNNNNNNNNNNNNNNTA
ACATATGTTGATCATATTTGTTGGCTCTAGGGATTCCAATATCATTCTCT
GGTTTCTAATATTTAAGAAGCTGGGAATAATTTGTAGCCAGTTTAGC(C/
T)AGTGGAATAATATTTGAGTTAGTTCAACATGACTCCTCCTGTTTATAT
TATTGTTATTGTACTCCATCAGATTTGTAGTTAGTTGCTAAATTCTCATT
GTGAAAAC
2520 ZOCMUSC-RS1378794

(SEQ ID NO:55)

ACGACTTAGGGGTCGAGAAGAATGCAGTCTTAAAAACCTTGCTTTTTAAA
GTGCACTGTTAACTGTTTAAAGAATAAAGGAAGGTTCCAGTGCCCTTTTC
TCCATCGGAGTGTCAGTAGATTAAGCAGGATAAACCTTTTGCCTGAGTGT
TGCTGCAATATTTAAAAGTACAAATCCAATATTTCTGGTCCACGT(A/G)
GATTTCTATGAATAGCTTCCCAGCAAATAACGAAAAAAAGAGAGTACGTA
TGTTGTGAAGTTTGTTCTGTTTATTAGCAACTTCCCGCATACTTCAACTT
TCAACAATTTTACTCTAGAGGCAGAGTAAAGGGATACTTTCTTTAGGAGG
TGACTCTTACTGGACGAACACTCAGTGTTTCCAAAACGTTTGTGAGATCT
2560 ZOCMUSC-RS1911847

(SEQ ID NO:56)

CATATCTGTTGATGTAATTGTTATCCTTGTGTTTTTTAGAAGGAATTGGT
GTGTAGGGGTAAAACAGGAAAGCGAAGAAGATATTAAACTTGCAACAAGA
AAAAGTTAGAAACTTCGATCACAAATGCTGAGTTCCCAAGGTTGTAAATT
TTCAGTTCACTTTGACTTTTCCCAGACTCTTTGGTCAAAACAAACAAGTA
ACAAACTAAACAGTTTTTCTATCACC(A/G)TTGCAAACCTGATATGAAA
TCAGAGAGTAGGTATGTGTTCATGGCAGTTCAAGAATATATCACGAGGTT
AGGTGCATGTGCCTATAAGAATAGAAAGTGGTTCTTCAGAGATGTGTGTA
CTTAGATCAGACATGATATCTATCTAAAAAAAAGAATGATGCTGAGCTAA
GATGGAGGGGAGACCTCCACAGCCCAGA
2514 ZOCMUSC-RS1999288

(SEQ ID NO:57)

TCTAAGAGAGAAACATGCCACGTCAGAAGGAAGGAGAATATGACAGCAGA
TTTTGGAATCAATTGTCAATGTAGTTTGCTAGCTTATCATGGTTTCTTAG
ACACTGTGTGAGCAAATCTCACAAATGGAACTGATTTACCATAAAAATGT
GCCTAATTTCCATTAAATCTTGTTCGTTGCTTTACTGAGGCACTGAAGTT
ACCAATGTT(C/T)CACTGGTTGACCTGCGGGGCTATCTCTAGGTTATGT
TACTCCAGAAAATGAATTGTGTATAAAAGAGGCCTTGGAGGAAGGCGTTT
TATTCGCATCAGTTGTTTTGCACATTGCTTAAGCTAGAGATGTTAGCAGC
TTCTTAAAGAGAGCAGCGTTAGCCAGACCTTTGGGGCAATAGTGGGAAAT
GGAAGTTTCTCTGTCCTATGCTTGATAGAACCATGTCGGTTGAGACACGT
TTCTATCATGCATAGGGCAGGGTATAAGAAATCTGTTTTCAGAGACTTCA
TGGGATAAATGAAGGCTTAAGAGCCCTTCATATCTCAGTTAAAATCCCAG
AGCTGCTATTTGCC
2510 ZOCMUSC-RS256516

(SEQ ID NO:58)

TACACCTGAAGCAAAACTTGGACAAATGTCTTGGGAATGTCTTTCCTGAT
GATTTTCTTTCCCATGCCTCCCTAATCATGGAAGTCAGCCTTTAGTCCAA
AGATAAGGGTATATAAAAAAGCTCTATGGCAGTAATTTGCTAGATGAGAA
CAGAGAATTATTGCTATTTTCTAATTCTACTCTGACCTTGGTATTCTAGA
ACTGAATAACTCTTTCTAAACTTGTACCACATTCCACAAGTTGTTGGATT
TTTCTGACCCTGAATCCTAATATCCCACTAACTTCATTCCTGATACCTAC
ATGTAAACTATCCTCATGTAGCATTTTTAATGCTTAGATCACCATCCATC
ATCTTTCTTTCATTCTTGCTTCTGCTTGCCACATCCTGAAC(C/T)CTGG
TTAGTCCTTGGTTAAGAATACCTTCATCCATTTGGGTCTGTTTGTTTCTT
TGTATTTTAACCCTGGAAAGACTTCCTGGTTTCAGATAGTCTTTCTGGTT
TCATAGTCCATCTGCCCTTCCCCAAAATAACAAAGAGATGTCTTATCTTG
CTTCCTCCTGGTCTTCACCTATCTCTAAAACACCTTCACTCTCTAGATCC
CAGGTTTTCCTAGGCTG
2559 ZOCMUSC-RS1343836

(SEQ ID NO:59)

TCTAGANAACTTCCCATCATTCTCTTATTCCATAGAGGCACAACTNNNNN
NNNNNNNNNNNNNNNNNNNNNNNNNNNNNNNNNNNNNNTAGCTAGGCATA
TGATTGCTTGGTATAGATACTATATTTCCTACTAGACATCCTTGAAGTCA
CTTGTAGATCATACATGAAGTTTGAGGAAATAAAACGTAAGTTAACATGT
CACATTTTTCTTTATTCATTTAAGCATTTATTAAATGTTAGACATGGTAA
TACAATACACATGAGGTATAAAAAGATGAATATTACAACAATTACCTTTT
TATTATTGTCTAGTACACACAATCTCTTATAAANNNNNNNNNNNNNNNNN
NNNNNNNNNNNNNNNNNNNNNCATATGCACTTCATGGAAGCTTTGGGAAG
CCTTTCTTAGAGGATGATTGATGCA(C/T)GCCCCTTGTTCTCTTTCACT
GAAGCTTCAGCCTTCTTGATGGCTGAAACTTCAATATGATGGTGACAACA
AAAATGAAATGGTTGGTACTCTAGCAATGACCTGCAGTGAAGGGAAGCAC
TGTTTCCTACAATGAAGAGTTGGAATAAGCCTGGGACTCTGAGAGCNCCT
GTGAGCCAGAACCTACGTATTAGC
2487 ZOCMUSC-RS1401417

(SEQ ID NO:60)

GGAGCTCTGGGAAAAGCTTGCTGAGCAGGCAGAAGGCTGTGGTCCTGTCC
CACCTGTGAGTCAGTGCCACTCTCTGGGACTGGGGGTTTCCCAGGAGCGT
TGTATTTATGGCCTCCTGCTGCATTCTCCTACCTCAAGGACACAGCAAGT
GCACAAGGCTGCCTACCTCTCTCCCAACTCCACTGTTGCTGTGCTGTTGG
CTTCGCCACACTGCCTGCCCTCCTCAAACTTT(G/C)TGAACCTCAGCTT
GTTTGCTTTCCAGATCAAATCCCTGTTCCTAGTTTTTTCTGCTGCCCATC
AGATAGGTCTCTAGACTAGCTCTGTTCTCTCCCAGGAAGGAACTGAGAGT
CCAGCTTCCCCCTCCTCCCCAAACACAGTGTTGAGCATAACAGATCCTCT
CCCCACAGGAATGGGGAGTGACCCGCTTGACCTTTGAATATGACTCTGAA
CCCTTTGGGAAAGAACGGGATGCAGCCATCATGAAGATGGCCAA
2495 ZOCMUSC-RS951917

(SEQ ID NO:61)

CTGGGAGAACCCATAGTCTTCCACCATCACACTGTAACACTGATTAGTTA
ACCATATTAGTTAGTTGAAGCCTTAGATCTGGAGATGATGAAAGTTAGAG
CCAGCTAAACTGGAGGAGTGGTGTGGCAGGGAAAGAAGGAAGCCCAGGAG
GTTGGACACAGTAATCCTAGGCTGGAGAAGA(C/T)ACAGGGAGGATGAG
AAAACAGAAATTTGGGTGCCTAGAAATCTGGCCCTAGAAAAGGGAAGGAA
TAGTTTTGTCCAAGATCAGTCCTAGCCTGAAAAAAGAAGAAAAGGGAGAA
GTAAAGAAAAGGGAGAACAGACCATCATCAAGTCAACTCCATTAACTTTG
TGTGTGTTTCCATTCATGAAGTTTTGTTATAAACTAGTGATAGGAAACTT
TAAAAATCTAATATTACCTAAGGTGGGATTACATGATTCCCTTATAGGAG
GCTGATATGTGGTAGGATTTGGGGATTTTGGAGATGGTCCCAAATCTTAG
CTAAAAGTATGTCCACAGTCCCCATTAGGTGTCTGAAATTCTGTTAGGGA
AGGTCTTCATGACTTGTCTTCCCTCTGCCAAGGAAAATGGC
2508 ZOCMUSC-RS1929609

(SEQ ID NO:62)

AACAAGTGTTTAAAATGTTTTGATCATGTTTTCTTTATGATGAGCTATTT
TAGCCCTCTTCTAAATGTCACTCTAGAAACATACCTACATAATTGAATAG
ATTTATTAAAATCATTTTGGCAATATTTTATAAGTGGTGNNNNNNNNNNN
NNNNNNNNNNNNNNNNNNNNNNNNNNNNNNNNNNNNNNNNNNNNNNNNNN
NNNNNNNNNNNNNNNNNGGTATGCTATAAATATGTACAAGAT(C/T)GGT
GCTAACTGGTTTTCAGGGGCCTATAGGAAGGTAAGTCCTATGAGAAATAA
TTAATTTTTATTCTTATTCTTGTCTTTTTAAAATTTGCTTTTGTGTTACA
GAAAATGAGAAGCTGCCTCCAGGATAGGGGGAGCTTGTTTTGCTGTGGAG
ATAGCTTCTAGAAGGACAGAATTATGATTCTCCATAGTTTTGCCAACATG
TATTTGCTAGAGGGTTTGGCTTAGAAGCTTTAATGGCTATGGAG
2563 ZOCMUSC-RS1986710

(SEQ ID NO:63)

AGTGCCAGGACCTATTCTAGGTGCTGGGAAGTAAGATAAAGCCCTGGCAT
CATAGAACAGCCATGATGATTCTTCACAGAGATTCATGAGGTAGCAGTGA
GAGATTAGGAGTTATTAATAAATAGCATTTTCTTTGTAAGTAAATGACGA
TGAATCCCAGACTAAAGGATTCACAGGTGGTCAAACTGTGAAGCTAGGAC
CGGCTAGAGAACAGCAATCAGGTCTCATGA(A/C)CCCAGCCATTCGTCA
TTTCTTCCATACATGCCAGACATGGCCCTTCACTGCTGATCAAAAGGACA
CAGAATAACAGAATGGTGCCTTAGAT
2536 ZOCMUSC-RS2018205

(SEQ ID NO:64)

TCTAGATCCAGAACTTAGCTTGGTTCTTTGTTTTCTAATTAACGAAGAGC
TCTTTCATCTGATGCCATGAGAAAGC(C/T)TGTCAATCCTGCTGTCAGA
TTACTCCTATATCTGCCTTTCCATGGGAAATATTTTAACGTGCTTTACAG
GACAGTGAGTGGGATTTCACTAAGCTACAACAATACATTGGTGACTGCTT
TTCTTTCTAGTTGCTAAGAAATGATGGTGTCTATTGCAAACTCCTCTTGT
CACTTGCTACTATTATAACACACAGCTGGTAAATGAGGTTCTGAAGCCTG
ATAGGGTCTACCTACCTTTATTTATTAAAACATACCCAAATTTATGAAAA
GAATCTGACAATTGTAAATATGTGAATTAATTTAGATCAATTCATCATGT
ATCCAAACTTGGCAGAATTCACCAACCCAAAACTGTCAGTTCAACCTTAA
TCCCTCCGTGTTTCCTCTGCTCCAACTCTACGCGTTTTATAATCCTGCAA
A
2481 ZOCMUSC-RS750841

(SEQ ID NO:65)

TGCTTTTCTGTTGAGGACTTTAGTGGAGGAGTGTACACAACATATGCTGA
TAAAATAACACCAGAAGGAACTACCAAAACATTTAAGAGATCACAATCAC
CACCCTAACCACTGTGGGTTTTTGTTAACTCCACTATTGTTTTACTAGAA
TCTAGACTCTGACAAAGGTAGGATTGGACAAAGTTCACTGCCTGTTTCCC
AAAATTCTCAGATGTTTCATTCTTAATGAAGTCTCAAAATT(A/T)ATGT
TCCAGTCCCAGGCCACATATAGTTGTTGGACAGTAGACACCATTCAGAGG
ATTCTACTCCATTCACTGGCCCTACAAAAGCACTGATTCTTGTGCCATCA
CTCTCAGCATTCCACTTTCTTCATCTTTATTCCATTCCTCAGTTTGACAT
TTAATACTGAAATTGTAAAGTACCAAAACATATTTCAATTGTCAATTCAA
ATGATTTCATTTGCCTTTCACTCGTTCTAGATTTTCCCTTCCTCCAAACT
CTCCTTTTGCTTTTTCCCTACACTTATTATTGGTTACTTATACTGATACT
TACCCAGAATGTAATGGGAAAAGCACTGCATCTGATTTTATAACATCTCA
GTATAAGCTCTAGCAGNNNNNNNNNNNNNNNNNNNNNNNNNNNNNNNNNN
NNNNNNNNNNNNNNNNNNNNNNNNNNNNNNNNNNNNNNNNNNNNGTTTCA
GCACAGAGATATTTAAGGTCCATTTCAAAAAATATTCTATAATAGGAGGA
AAAGGGTAGATATAGCCAGCCTCATAGAAAGAAATGTCAGTAACAAGTGT
GAAAGAAAAAAACATT
2497 ZOCMUSC-RS1424724

(SEQ ID NO:66)

CTTACTATTGCACTAAACTTAGAATGCATAGTGCCCTCACCACCCCCTGC
AATCTTTTCTTTCACTCATTTGATGGGGGAAAATTCAGTACATTAGATGT
TTCCAAATATACCCCTATTATCAACAGTGGCCCTTTATAAATTTCAATNN
NNNNNNNNNNNNNNNNNNNNNNNNNNNNNNNNNNNNNNNNNNNNNNNNNN
NNNNNNNNNNNNNNNNNNNNNNNNNNNNNNNNNNNNNNNNNNNNNNNNNN
NNNNNNNNNNNNNNNNNNNNNNNNNNNNNNNNNNNNNNNNNNNNNNNNNN
NNNNNNNNNNNTCAACAGTGGTCCTTGACCAGCACTCTGCTGCCACCCAA
AAAATGCATGAGAAATGG(C/T)CTCTCCGTGAGCTAGTTATCTTCTTTT
GCCATCCGGTTCTATTTTTATCAGTTCATTACACTCCTTCTGACATTGGC
TAGGATCCAGGCCCTTAGAAACTGCCTGGCAAAAAGCACTCTAGAGAGGG
CATGCTGCTACATAAAATGCATCTGTCACCCCAATTTATGCAAATCACAG
GCAAGGACCNNNNNNNNNNNNNNNNNNNNNNCTAGTAAGAACTTTCTAAT
ACAGAAGAAAGAAAATT
2524 ZOCMUSC-RS1355828

(SEQ ID NO:67)

TCTCTAGAAACAGCGGAAGGAGAAAATGTCTCTATGAGATTGAGTACAAC
AGCAACTAAAGGGACTGAGGTCATGCATTCCACTTCTGAGCTTATGGCCA
CGTCCAACTCTTACAAAAAATAACCTTTCTCTCCTGCACTCTTAGTAGTT
TGGCCAATTTTATATGGACTTGTGCTATTCCTTTACTTTTTGGCTTAAGC
(A/G)TATATATGACTCCCAAGGCCATGAAAGCCCTAACCATTTGGCTGA
GGGTGGTATTTTCAGGAACTCCACCAGTGAAGCAGATACTATGTATTGGA
CAACATCATGTGTTCCTAATGATAGGTTCTTATTCAAATGACAATAAATA
TTGTTAGAAAATTCAGGCGTAAGTTTGAGTGACAATAGTGATAAAAGGAA
AGTCT
2529 ZOCMUSC-RS718319

(SEQ ID NO:68)

CAGTCAACTAGTTTCTATTTTTGCACTCATCTGCTCTGATCTGTTTAGGC
AGAAGCTTAAACAATTCTGCTTGCTCAACTAACTCAGACACTGTGGATGT
TAGGATGAAGGTACAGTTTGCATATTAAAAGATA(A/G)GCCAGTACATC
TCTGAGATTTGCCATCCTCTCTGGTAAGGACTGCACTCAAAGTAACAGGA
GGGCCTAACCTTAAATAAATATGCAGCCATACTGCTAGGGNNNNNNNNNN
NNNNNNNNNNNNNNNNNNNNNNNNNNNNNNNNNNACAGGCTTTCTGACAA
GTGATTGATAGATTTATTTCAAAGCTGTCAAGTAGAGCCCAAAAAGAGTG
GAATCTCACGGTTCTCTTGGCAAGACTATGGTTCTCAGATGGGCATACAA
GCTCTTTCCTTTCTGGGACAGTCACA
2490 ZOCMUSC-RS1378335

(SEQ ID NO:69)

GTTCACCATCTAAATCAGTTGTCCTTTATGGTAACACAGGATTCACAGAG
CAGCAATCTCTTTTTGGGTCAGGCAGCAACCTTTATTTGTGCTCTGCACT
TCACCCACATGTTTTTGTCTGGGATATTTCCCCGATCCCATTCTTCTGTT
GTTTCACACTACTT(G/C)TTGTCCTTCTCTCCCACACCTAGGCAGTTCC
AAGCCTGAGCCTTTTCTNNNNNNNNNNNNNNNNNNNNNNNNNNNNNNNNN
NNNNNNNNNNNNNNNNNNNNNNNNNNNNNNNNNNNNNNNNNNNNNNNNNN
NNNNNNNNNNNNNNNNNNNNNNNNNNNNNNNNNNNNNNNNNNNNNNNNNN
NNNNNNNNNNNNNNNNNNNNNNNNNNNNNNNNNNNNNNNNNNNNNTGCTG
GTACTAGTGACTCAGCAACACTCCATGACACTGAGCTCCTCTGCCCATTG
CACCTCCTCCTGCAGG
2515 ZOCMUSC-RS1408282

(SEQ ID NO:70)

TGATACACTTTTCATTAATGTTTATTCTTGTATTTCTGCTGAAAATATTT
CTGTTAAACTAGTTAAATCTTCTATATTTCCATTCAGCAGAACATATAAT
AATGCTAGATGATTGCTGTGTCAAAAAATATTTTGTTCTCTCACCTTATA
CTAATGACGGTAATAAATCTGACCCTCCAGGATTTTCTTATTGCTTTTTT
TTGCAGGCCTT(G/A)AGTATGGCAGAAAACATGATGTAGTGAAAAATAC
CTGGGGTTAGTCTAGACCCTGTCCTGTTACGATCCAGCTCTGACTCCTTA
AGTCCATCTACTGACATCTCAGAAAATGTTTGCTCATAAAGGAAAAATAA
TATTTCACATGGATGGATCTGTATTTCACAAGATAACATAACGTAGTTGA
AAATGAGTAATAAGGCATAAAACTCTACAATATTATAATTGCAGCTCCAC
AGCTTTAGGAAAATTACTCCCTGCTCTGTATTCTCTTATCCATG
2479 ZOCMUSC-RS718978

(SEQ ID NO:71)

TCTAGAGAAACCTCCCAAAAATAAGGCATACCATCCCTCTGATGGTTNNN
NNNNNNNNNNNNNNNNNNNNNNNNNNNNNNNNNNNNNNNNNNNNNNNNNN
NNNNNNNNNNNNNNNNNNNNNNNNNNNNNNNNNNNNNNNNNNNNNNNNNN
NNNNNNNNNNNNNNNNNAGATTGAGGAAAGGAAGCAGGCGGGCAGCTGGT
GGTCTTCCAAGCACTATAGCTGATCAGCAACCAGAGATTCCAGAGAAACA
TGGAATGATACCTTAAAGTGCTGAGGCTAACTAACTGCTGAGCACAAAGG
ATATTTTTTCAGGCACACACAGGGATTCTGAAAGTGTAAAGACGAGTCCC
AGGCCCTCATTTGAATATTAAAAAAAAAACTA(A/T)AGCTTGATCTTCA
GGAAAAATGGAAACGAATTCAAAAGCAGAGACTGGGATACAAAAAACAAT
GAAGAAAGAAGTCCGTGAACATGTTGACAAATCCAAATTAGTATTTCTTA
TAAATAATAACATTGATAACTGATCTAGA
2568 ZOCMUSC-RS723470

(SEQ ID NO:72)

TCTAGATCCTTTTATAGACATTAACATATGCTTTATACTTTAAGTTCTAG
GGTATATAAAAAATAAAACACATAAGCTAATGAGTTCTCTTTTCAATTCT
TAGGATTTAAACTGTCTTATGGAGAGATACCTAAAGCCTCTTCAAAAAGA
AACTTTTCTCACCCAGGATGAGGTATGCTGGAAATGGTTTCAACTTTGTG
ACCATCATACCGTGGTTTGACTTGTTGGTAAAGAGGAAAAATGGGGACAT
GCG(G/T)AACACTGAAAACATTTTAAATTTATTTAATTGTAACTAGCTG
AAATTATTGCCTGCTAAGCTTTGGTGTGCTCATGAAGAGTAAAAAACTGC
CCCGCTCTCTGGTAGTGGGATTATTCTCTTAATTGATAAGAATTGATAGA
AAAACCTTGTAATCAGATATAAATAACGTTTAGGAAGACTAATGAGATAT
GAGGTGCATTAAATTCTGTTTTATTTCTAGCTTGACGTGCTTTTTGGAAA
TTTAACGGAAATGGTAGAGTTTCAAGTAGAATTCCTTAAAACTCTAGA
2504 ZOCMUSC-RS1570303

(SEQ ID NO:73)

AGAAATTGAAAGGATAGCTAGTAATTTTTTTTCTTCCTAGTTCAAAATCT
TCCACAAGTTTTCCTTGCATCTTCTCCAAACTTGCTGTTTTTTTTCCTGT
ATTCATTATCTTAGTGAGTAACATTGTCTACGTAGTAACTCTAATTAAAA
ACTTTGGTATCATGTTCAACATCTCCTTTGATTCTTGTGTACCCCTTTAC
TTACCAAGTCCTATTCTTTTTCTTAGCT(A/G)CTAAAATCTGTTTCTCC
CTCATTCGACTTTTTGCAATACTGCCAGAATTGTCTTTCAGAAATATATA
CTTCTACATAATGCTATTGTTCTCATACTTGGAAACATTTTTGTTTTTGA
ATAGCACAGTTGATAACATCCTAACTCTTTGGTGCAGCATACAAGATCCT
CAACAGTCCTTATCCAAACTTGCCTTCCTAGCTATATTTACTACTCGTTT
CTTCCTAAATTTCCCCAATGCTCAAGCTTCCCTGAATCCATGATATTTTT
TGATACTTTTATACNNNNNNNNNNNNNNNNNNNNNNNNNNNNNNNNAAGT
TTCATTATACCTTACTTGTTTCCGAGATCCAGCCCCCATTTCCCTTCTGT
TGTGAATCCCATTGCTAGTGTTTTTAGACAGTCAGCCCCTTGTTCCTTAG
CACACTCAGTTGTGCTTTTCTTGCTTGCTAGATTCTTCTTCTAGATGGAG
GGTTCTTGAGGCCACGGACCTGTCTTGTCTTTTATTCTCTTTTTGTGCTC
AATACAAGGCCTAATGCCCTGCATCATCATTTTTGAAATGAAAACAACTA
AAGTTTTTAAAAGCTCAAGTGACTAAGTAGATGCTGATAGTATTAACTGA
TACACAGAGGGATAGATTGGTTTTTGAGCATGTTGAGTTTGAGATATTTA
TGTTGCATTTAGAAAATGTTCAGGACATAGTTGAGAATAGGAGGAGGCAA
GAAAAACAGTTACAAGCATTACTAGTATGTAGGTAATATTCCAAATCATG
GAAGTTTTTGAGACTATGTGCAGAATGAGAAGAGAAGATAGAGAAGAAGA
TAAGTTGCACTAGTGACTAGTGGGCAGGAAACAAGAAAAAAATGAAATGG
GTAGCAGTTAATTTTCTCCCTCTTTTATAGGATATAATGG
2663 GSTM1PE1_287

(SEQ ID NO:74)

GAAGCAGCTGCGGGACGGACTCTAGGGACCGTTCCTCTTCAGGGCTGCCC
GCCTCAGAAGGGCCTGTGCATGCCGCTGTGTGTGTGTTGGGGGTGTGGGC
GGGTAGAGGAGGCAACGGGTACGTGCAGTGTAAACTGGGGGCTTCCCTGG
TGCAGACAAAGTCAGGGACCCTCCATCTCTGAC(G/A)CGACCTGCGGGC
CATCTCTCCCAGCTGGCCCACGCCATCCGCCTGCTCCTGGAATACACAGA
CTCAAGCTATGAGGAAAAGAAGTACACGATGGGGGACGGTAATGGCACCC
TCGTGTTCGGGCTCTGCCCACTCACGCTAAGTTGGCACCAAGCAACCCAT
GGTGGCCACCTGTGGCTGCCTCTGCAGGCC
324 CYP2B6RS2279343

(SEQ ID NO:75)

GTTCAGAGGCAGAGGGGAGTGGGGAAGTGGGGTTCCCATGGAGGGATTGG
GGCCCAGGAGGCGCTCTCTCCCTGTGACCTGCTAGCTCAGCCCTAGGCAA
ACCTCACCACCCCTTCTTTCTTGCAGCTGTTTGAGCTCTTCTCTGGCTTC
TTGAAATACTTTCCTGGGGCACACAGGCAAGTTTACAAAAACCTGCAGGA
AATCAATGCTTACATTGGCCACAGTGTGGAGAAGCACCGTGAAACCCTGG
ACCCCAGCGCCCCCA(A/G)GGACCTCATCGACACCTACCTGCTCCACAT
GGAAAAAGTGGGGTCT
2672 CYP2D6_RS2004511

(SEQ ID NO:76)

GACTCTGTCAACTAGTCCTGCGCCCGAGAAGCTCCACAGTACCCTCTCCG
ACCCCACAGCAGGGCGCAGTCACACCTCTCAGAGGCACCCACACTGCCCC
CTCTCCCTGCAGGCG(C/T)TGGGTCCTCCAACATTCTGGCAGGTCCTGG
TTTGTCTCCCCACTAGACGGGGGCTCTGGATGGACAGGCCAGCCCTGCCT
ATACTCTGGACCCCCCACCCAAGTGGGGACAGTCAGTGTGGTGGCATTGA
GGACTAGGTGGCCAGGGTTCCTAGAGTGGGCCCACCTGGCAGTAGCCATG
CTGGGGCTATCACCAGGGGCTGGTGCTGAGCTGGGGTGAGGAGGGCGCCA
GGCCTACCTTAGGGATGCGGAAGCCCTGTACTTCGATGTCACGGGATGTC
ATATGGGTCACACCCAGGGGGACGATGTCCCCAAAGCGCTGCACCTCATG
AATCACGGCAGTGGTGTAGGGCATGTGAGCCTGGTCACCCATCTCTGGTC
GCCGCACCTGCCCTATCACGTCGTCGATCTCCTGTTGGACACGGCCTGGA
CAGACATGCGTCCCCACAATGGGTCAGCACCCAGGGGGTCCGGCCCTGAC
ACTCCTTCTTGCCTCCTATGTTG
65 CYP1A1_RS2606345

(SEQ ID NO:77)

GGGCTAAATATCAAAGCACACTAGATCCCTGAGTCAACAGGGGACAGTGC
CAGGCTTTGGTGTGCTATGGTGTCCCCTTCTGCACAGTGGGTATCCCAAG
GACCTGCAGCCTTTGTAAGATGGTAGGAGGCCAAGGGAGATGTGACTGGT
GAGTTTTTAGGGACTGGTATTTCCAGCTCCCTGCAGTTGGCAATCTGTCA
(A/C)CCTGATTGTCTCCCAGCAAAGGACAAAGAAGATGGTCAATGAGAT
AGGAAAGGCCTGGGACTCCTGCACAGATCTGCCTCTATTGTCCCAGCTGT
CTAGGACATCTCAGCACTGACAAGCCACCCTTAGGAGGGTAAAATCTGCC
AGGGGTAGCTTCTTAGGCTAGGGCAGGGTACAGCTGGTAAGAACCCAGCC
CACCC
225 CYP2C8_RS1891073

(SEQ ID NO:41)

TGAGATATGGACTCCTGCTCCTGCTGAAGCACCCAGAGGTCACAGGTAGG
ACCACAGATGATGAACAAAGTGAATTTCAGAACAATGCTGAGAAGATGGT
GCCAGTATCCTCCACCTTGTTTCTCTCAGAGAAGGCTCATTCTTTAAATT
TCTGTGTCATCAGCTGTAATCTGTCTAAATTTGATGACACAATTTAAAAT
GACATCTTTGTACAATGGAGGAGGATGACAGAGATCAGTAGAAACAGTAT
GGCAGTAGCAAAATAAGTAAAGCACTGATGAAGTGTCTGGATTTCAGCAA
AGGTAATTTGTGGTAAGGAGAGCCAGCATAAATTGCCCTAGTATTGAATG
TTGGTTTTATTATGAAAAGTCCACTTTGAACAGTAGGTTCATTTCTCATT
TTAAAAATTCCATGCTCTAATGCTGTGGTGGGGAGATGAAAACAATCTTT
ATTGAAGCATAAGTGGAAATTCTAGAATTGTACTGAGGCATCCTGACATA
AATTCCAGTCTGGGAAGTAATCTAAAAGTTAGTCTCTTACAAAGGTGTTT
CTATTTAAGCAGAGGCCATACCTAAAGGAATTTTATTATTCTAGGAGTGT
GTTTCATAAAAATGCTATTTGACCAAATAGGGACATTTGGAAGGGGGTTT
AATAATTGCATCTTTCACATACAACTTTTCTTTAGAATTTACAATTTACC
(C/T)TTAGAGTAAACTCTACATTTCCTTAGAATTTACATTTAAATAGTT
CCTGCTTTGCAGCAGATAACATACCTTTTTCCCTGTGTCAGGATCCCACT
GAAATTTCAATAACTAAATTACAAATTAAAATTATCCTGCTGAAGTGAAA
AGAGAGGAGAATAGAAAATAGCCAATAAGTCTTTGGCAAATTTCTAAAAC
ATGGAGAGACAATGGAGGGCTGACAATTGACACAGCATAGAGGATGGAGT
TGTAAGTATTAGCAGAGGAAGATTTATCAAGAGGAGAAGCTAATCTGTGT
CACTGTGATTCTCATAAGGTTCAGTATTTGGAGGCACCAAGAGCCAAAGA
CAGTAGGGAATGAGACTGAAAAGGGAGGCTCTCCTGCCCAAGTTTCCTCC
ATAACTCCTTTTATCAGGTACCTGATTTTTTCCCACTGGGAAAGGGAAGC
ATACTCTCCAGAGAGACTGAGCCTAAGAACCCCTGTACTCGGCGACACTT
TACAGGGCCAGGAAACTGTGAGATGTGAAGACAGAAAAAAAAAAGGTTTG
AGAAAGATCTATTCCTCAGATTCAAAGACTCAGCATTTTTCTTCATCTTG
CTTCCTGACATTCAGCAGCCAGCTAGATACTCTCCAGAGAAGAAACAAGT
CTGGAGAAAAGACCTCCGTATTTTGCCAACTTAATAGAAAGTTATCTATA
249 CYP2C8_RS1891072

(SEQ ID NO:78)

TAATCTGTCTAAATTTGATGACACAATTTAAAATGACATCTTTGTACAAT
GGAGGAGGATGACAGAGATCAGTAGAAACAGTATGGCAGTAGCAAAATAA
GTAAAGCACTGATGAAGTGTCTGGATTTCAGCAAAGGTAATTTGTGGTAA
GGAGAGCCAGCATAAATTGCCCTAGTATTGAATGTTGGTTTTATTATGAA
AAGTCCACTTTGAACAGTAGGTTCATTTCTCATTTTAAAAATTCCATGCT
CTAATGCTGTGGTGGGGAGATGAAAACAATCTTTATTGAAGCATAAGTGG
AAATTCTAGAATTGTACTGAGGCATCCTGACATAAATTCCAGTCTGGGAA
GTAATCTAAAAGTTAGTCTCTTACAAAGGTGTTTCTATTTAAGCAGAGGC
CATACCTAAAGGAATTTTATTATTCTAGGAGTGTGTTTCATAAAAATGCT
ATTTGACCAAATAGGGA(C/T)ATTTGGAAGGGGGTTTAATAATTGCATC
TTTCACATACAACTTTTCTTTAGAATTTACAATTTACCCTTAGAGTAAAC
TCTACATTTCCTTAGAATTTACATTTAAATAGTTCCTGCTTTGCAGCAGA
TAACATACCTTTTTCCCTGTGTCAGGATCCCACTG
74 CYP2E1RS915907

(SEQ ID NO:79)

CGTGCAGGACTTCCAGGCCTCCCCAGCTTCATCCACCTGCAGGTGCTCAG
GATCCTGATCCCCTGCCCCCTTCCCACCTTGGTGAAACTTCTTGTATCCT
TGTCTTGTCCTTTCCTATGGCTTGTGGCTCAAGAACAAATGTGGAGCCCA
CACTGATTTCCCAGGACTGTCTGAGCATCTTCTCCACCAGTTTGGCCCCT
CGTGGCAGCAGA(A/C)ACTAGCCCTGTAGCAGGAGGGGTTAGCAGGAGC
CGTTTAGCTCCTGCCTGAGCTATGACCAAGGTCAGGGGGATCTCACCTCT
CCCAGGATGGCCCTCATGCTGTGGAGGGAGACAGAGCCCTGGCCTGCCCT
CAGCAGATTTCTGGGAGCCTCAGTTTCCCTGGCTGTGAGTGGAGATGACT
CTGTCTGTCACAGCTCCAAGTCACAGTTCCACTGGGAGAGCCTCTTGGAC
ACTGTCTCCTGTGTCCCTGTGGAGCTGGGAGGTGGCTGGTTCTGTGCTGA
AAGGAGACAAGCAGCCCCTTCTCTCCGGTCTGTCTCCGGTATCACAGGAA
AAGCACAGTGCAGAGCGCTTGTACACAATGGACGGTATCACCGT
134 CYP2C8E2E3_397

(SEQ ID NO:80)

AACTCCTCCACAAGGCAGTGAGCTTCCTCTTGAACACGGTCCTCAATGCT
CCTCTTCCCCATCCCAAAATTCCGCAAGGTTGTGAGGGAGAAACGCCGGA
TCTCCTTCCATCTCTTTCCATTGCTGGAAATGATTCCTAATAAAAAAAGG
GGCAGAAACTGGGAGAATTCACAGCCAAGGAAGAAAGTGCTGCAACACT
(C/T)GGCAGCCATGCAGATAGGCTAAGCTCTGCTGAGAAGCTTTTTAGG
GCTCTGTTTTCCATCCCCCTCACCCCAGTTACCAAAGCTGACACAGAAAT
ATGTGCACCTACCAAGTCCTTTAGTAATTCTTTGAGATATTGGGGAATTG
CCTCTTCCAGAAAACTCCTCTCCATTATCAATCAGGGCTTCCTTCACTGC
CTCAT
373 CYP2B6RS2014141

(SEQ ID NO:81)

CTTACCATCACCATTCAGGATGCTTGCAAACCAACTGCTAGCTGCACCTG
TAAACACATATCTGTTTCTTTCCCCTGAGAAATGTCCTTAGTGTATTTGT
GGCAGTGTCTAGAGAAACAGCAGTGTCAGCCGCATTTTAAATTAAGTTAT
CTGCACTAGTGAATTCACTGGAAAGATAAGAGCAATATTTGGTTTTCTTC
AGCACCATACACAAGCCTCCAAGATGGGCATAGAGGAGATCTAAAATTGC
GTGATGTTCCATTAAGCGTTTTTGTTGCCACAAATGTTCTCATCTCAGTT
TGGAGAGTGGCTTCTACCCATCTGAACTCCTTGGAGGTTCAATTAGCTGC
AAAATTCAAGATGTCCCTTAATGTATAACTTAGCCTCAGATTCCATACAA
CTGTCACCCAAATACCACCAAGA(A/G)TGAGCACCCAGGAACCCAACTG
GAACCTTTTCTGAACAGAAACCAACTTATCTTCGTCGATTTTGAGGTTGA
TAGTAATTTCAGTTATTGACTGTTTTGGCTTTTAACTATGGGAGGTATTA
GGAAACTCTCAGGGAAACAATTTGGAAAGCAGCAGTGAGCTAGGCCAAAT
AGCAAGTTCTGGACCTGTGAGGAGAAAGAACAGAGTAAGCAAACCTCAAG
ATACTCAAGGTAGGCACTCGTGGTGTTGGAAAAGAGGGTCACCTACTGGC
ATTAGAGCAGAGATCAGTTAGATTTGTTTACCCATAAGTCTGCATAGCTC
CTGAACAAGGTGGGAAACTTACTTTTTTGTGGTCTTTTTCTAGCATGCTG
CGAAGGTGCATAACCACATTTAGTTGGAAAGAGACTTTACTGTATTTA
172 CYP2D6_RS2267446

(SEQ ID NO:38)

TGTGCGGGAGGACGGGGACAGCATTCAGCACCTACACCAGACAGAACGGG
GTCTCAATCC(C/T)TCCTGTGCTCTGCGTTCATCTGGACCAGTCTCAGG
CCCCAGCCATCTCCAGGAAGACCCA
179 CYP2D6_RS1058174

(SEQ ID NO:28)

GTCATCGGTGCTGAAGGATGAGGCCGTCTGGGAGAAGCCCTTCCGCTTCC
ACCCCGAACACTTCCTGGATGCCCAGGGCCACTTTGTGAAGCCGGAGGCC
TTCCTGCCTTTCTCAGCAGGTGCCTGTGGGGAGCCCGGCTCCCTGTCCCC
TTCCGTGGAGTCTTGCAGGGGTATCACCCAGGAGCCAGGCTCACTGACGC
CCCTCCCCTCCCCACAGGCCGCCGTGCATGCCTCGGGGAGCCCCTGGCCC
GCATGGAGCTCTTCCTCTTCTTCACCTCCCTGCTGCAGCACTTCAGCTTC
TCGGTGCCCACTGGACAGCCCCGGCCCAGCCACCATGGTGTCTTTGCTTT
CCTGGTGAGCCCATCCCCCTATGAGCTTTGTGCTGTGCCCCGCTAGAATG
GGGTACCTAGTCCCCAGCCTG(C/T)TCCCTAGCCAGAGGCTCTAATGTA
CAATAAAGCAATGTGGTAGTTCCAACTCGGGTCCCCTGCTCACGCCCTCG
TTGGGATCATCCTCCTCAGGGCAACCCCACCCCTGCCTCATTCCTGCTTA
CCCCACCGCCTGGCCGCATTTGAGACAGGGGTACGTTGAGGCTGAGCAGA
TGTCAGTTACCCTTGCCCATAATCCCATGTCCCCCACTGACCCAACTCTG
ACTGCCCAGATTGGTGACAAGGACTACATTGTCCTGGCATGTGGGGAAGG
GGCCAGAATGGGCTGACTAGAGGTGTCAGTCAGCCCTGGATGTGGTGGAG
AGGGCAGGACTCAGCCTGGAGGCCCATATTTCAGGCCTAACTCAGCCCAC
CCCACATCAGGGACAGCAGTCCTGCCAGCACCATCACAACAGTCACCTCC
CTTCATATATGACACCCCAAAACGGAAGACAAATCATGGCGTCAGGGAGC
TATATGCCAGGGCTACCTACCTCCCAGGGCTCAGTCGGCAGGTGCCAGAA
CGTTCCCTGGGAAGGCCCCATGGAAGCCCAGGACTGAGCCACCACCCTCA
GCCTCGTCACCTCACCACAGGACTGGCTACCTCTCTGGGCCCTC
2739 CYP2B6RS1038376

(SEQ ID NO:82)

TGGTGCAATTTTTGTTCACTGCAACCTCTGCCTTCCAAGATCAAGAGATT
CTCCAGTCTCAGCTCCCAAGTAGCTGGGATTACAGGCATGTACTACCATG
CCTGGCTAATTTTCTTGTAGTTTTAGTAGGGACATGTTGGCCAGGCTGGT
GGTGAGCTCCTGGCCTCAGGTGATCCACCCACCTCAGTGTTCC(A/T)AA
GTGCTGATATTACAGGCATAATATGTGATCTTTTGTGTCTGGTTGCTTTC
ATGTTGAATGCTATTTTTGAGGTTCATGCCTGTTGTAGNNNNNNNNNNNN
NNNNNNNNNNNNNNNNNNNNNNNNNNNNNNNNNNNNNNNNNNNNNNNNNN
NNNNNNNNNNNNNNNNNNNNNNNNNNNNNNNNNNNNNNNNNNNNNNNNNN
NNNNNNNNNNNNNNNNNNNNNNNNNNNNNNNNNNNNNNNNNNNNNNNNNN
NNNNNNNNNNNNNNNNNNNNNNNNNNNNNNNNNNNNNNNNNNNNNNNNNN
NNNNNNNNNNNNNNNNNNNNNNNNNNNNNNNNNNNNNNNNNNNNNNNNNN
NNNNGAAGGAATGTTGGTGAGAATGCCTCTCTCACCTCAATGCCAACTCT
GTGAAGGGCCAAACCATTGTCTTGCTCATCCCTGTACTCTCAACACAGCG
TGTGGCATATGACAGGTGTTCAAAATATTTGGTGAGGAATGAATGAATGA
GTGGCTAAATCAGCCACCCCCTACCCCCACAGCCCA
98 CYP1A2E7_405

(SEQ ID NO:42)

CTAGAGTATACCAGTCCACTCCAGGGAAGATTGGAGCTGAGGCTGCTTGA
GGGCTATACACACTCTGGGAACTAGGGGGTCTCCAAACCCTTGAGAGGTT
TGCAGGAGGAAAACTGCAAGGAGACTGGCAGAAAGCAGGCTGAAGTGGAA
GCTTCCTGGCCCGTGCTGGGCTC(G/C)TCAGTGCTTGAGAACATAGATG
AAGGGCAGACAGTGGCCGCAGACGAGGGACGCTGTGAGGAGGAGGCCTGG
CATGTCTTGGGGCCAGGAAGAGCTCCCTGATCATTTTTTCCTTCAGGATG
GGTAGGCTCTTGGTCTGACTGCCCGGAAAACAGGTGATGGAAGGACCAAG
GACTACAAAGGTCAGGAC
108 CYP3A7RS2037499

(SEQ ID NO:83)

ACATCTTAATTTTTGCTCAGCTCAAAACAGTTTCTATTTGCCCTTTTAAT
TTCTACTTCAACTTATTGGTTGCTTAAAAGTTTATTGTTTAACTTCCACG
TATGTGTGAGTTTCCCAATTTTCGTTACCTTATTGATTTTAGCTTTATCC
TATGATAGGTGACAGAGATACACTGTGTTATTTCTATCTGATTTCTTGAA
(G/C)AGCATGATTAATTTAAGCAGCAAATTATGATTTGGGTTATCCTAA
GAGACCCTAGCCCAATACATAAAGGCAAAGAGATTAGGGCATTGAATTTT
GTTCCTTTCATCATTCAAAAGATGCAGAAGGGGCTGCTGATCTCACTGCT
GTAGTGGTGGTCCCTATGCACAGACCTTCCCTTGCTCAGCCACTGGCCTG
GAAGA
2665 3A4E10-5_292_712037

(SEQ ID NO:84)

GAAGTGGTCTGTAGACCAATATTGGTCCCTTAAGTTCCCTCAAACATATC
TTCGGGAAACGTCCTTTGATTTTCCCTACATTTAACCATTAGTGTTGCAA
ATTCTCTCAAAGTTTGTCAAGATATATTGTAGCTAAAATAAATTACATTT
TTCTTGGGGGAGAGTACTACCTCATATTAACTTACAATAAAGTACTTTTA
GGATCATTCAAGGAACACACCCATAACACTGAGTATGTTATGCGGAAATG
CTCTCTCTGGAAATTACACAGCTGTGCAGGTGGCGGGGGTGGCATGAGGA
GGAGTGGATGGCCCACATTCTCGAAGACCTTGGGGAAAACTGGATTAAAA
TGATTTGCCTTATTCTGGTTCTGTAAGATACACATCAGAATGAAACCACC
CCCAGTGTACCTCTGAATTGCTTTTCTATTCTTTTCCCTTAGGGATTTGA
GGGCTTCACTTAGATTTCTCTTCATCTAAACTGTGATGCCCTACATTGAT
CTGATTTACCTAAAATGTCTTTCCTCTCCTTTCAGCTCTGTCCGATCTGG
AGCTCGTGGCCCAATCAATTATCTTTATTTTTGCTGGCTATGAAACCACG
AGCAGTGTTCTCTCCTTCATTATGTATGAACTGGCCACTCACCCTGATGT
CCAGCAGAAACTGCAGGAGGAAATTGATGCAGTTTTACCCAATAAGGTGA
GTGGATG(A/G)TACATGGAGAAGGAGGGAGGAGGTGAAACCTTAGCAAA
AATGCCTCCTCACCACTTCCCAGGARAATTTTTATAAAAAGCATAATCAC
TGATTCTTTCACTGACTCTATGTAGGAAGGCTCTGAAAAGAAAAAGAAAG
AAACATAGCAAATGGTTGCTACTGGCAGAAGCGTAAGATCTTTGTAAAAC
GTGCTGGCTCTGGTTCATCTGCTTTCTATTACTACAATAATGCTAAGTAA
AAAACCTCCAAAAACCTCAGTGGCATCTAACAATAAGCATTTGTTGCTCA
CACTCATTTCAATTGGTTTTGGTTGTGAATTACATGTTTGCAGCAGGCAC
CATAGTGGTGTGTGATGTCCCCTTAGCTGTATCCACATATGGACACAGGA
ATTGGCTCTTTTTATCTCTTTTTATTTTCTTGGTTACAGACATGTGACTT
TTTTTTTTGAAAGGTAACAATCACTTTCTCATATGTTATTTGATGCTAGT
GGTCATAGCCTATAGTCACATTTGTTTCAATGAGAAAGAAAAACCAGTAC
ACGGTTATGCTAAGGATTTCAGTCCCTGGGGTGAGAGCCGTCTCGAATGT
CTCCCCACTTCATAACTCCTCCACACATCATAGTTGGATAGTGAGCTCTG
CTGATATTGGCAGGACTTGCTCTGGTCTGGCTGTAGTCTGACGGAGCCTG
GCCCTGGGTGTGCTGTGCAGGCTGACTCAGCTCTCCCCACACCTATCTCA
TGTTCCAGTCAGGCAGTAACTGGTGAAGAAGCCAAGCTAGGAACCAGGAT
ATCTGGCTCCTGAGCTAAAGTCTTAAAACACTATCATATTGCCTTCCAAA
TATAACACCAAATACTAGGTGCATATCACCCTCACTGTTTTCAGACCTCT
GCCAAAATTGGGATTCTTTGTGGTATGAAGAGACACGGCTTTGGGGCTGG
CCCGGCTGTGACAGTGAGGTGAACACAAAGGGATGTTCTTCAGAGATTAC
AGTCCAGCCCTGAAGCAACAACTA
178 CYP3A7RS2740562

(SEQ ID NO:85)

ATTTTGGTTCTCACAATGTTCACACTCGCTATTGTAAAACAACTTTTTGA
GATTTGTCCTACCAAGGATCCCATATGTCACCAGGTGTTGAGGTCTTCGG
TCTAAACTAGGCTGAGACCATTGTGGTTACCACTTTTCTCCAAGCTTTGG
TGGCCCAGGGACTCCCAGCATCACGTTCTGTCCAGTGTCTGCCTATTCCC
(T/C)TCTTCTTTTTTTCTTCCCTTGATGCCCTTTTATCACATGCATTGT
CTCAGACCCTTCGAATATGTGCTCATAAATGCATGGCATCATCTCCTTCC
CACATCGATTCACTTTCAATTAAAAGCCAAAACTCTTTCATTTCAACTTT
GGATTTAACATGCTTTTGAAAGAAGGGTTGAGAAATATAGAGAAACAGAT
TGGGA
263 CYP3A7RS2687077

(SEQ ID NO:86

AAATCAATGGGATGTTTATTCCCAAAGGGGTGGTGGTGATGATTCCAAGC
TATGTTCTTCATCATGACCCAAAGTACTGGAGAGAGCCTGAGAAGTTCCT
CCCTGAAAGGTAGGAGGCCCCTGGGAAGGGAGCCCTCCCTGAACCAGCCT
GGTTCAAGCATATTCTGCCTCTCTACAGGACAGTCTGGGCTTGTACAATC
(G/A)TTTGCTTGTCTTTTTATGTTTAAAAGGTTTTTTCAAATCATGAAA
TTGATCATTGTCACACTTTACAAACCACAGACTAGATAAAAGAAAACTAT
AGCCAGTCACAGTCCCAGCAACTTAAGATGAAGGTCCTCAATTATGTCCT
TATGGGTCATAAGTGTCCAAAATGTAAGGACTCTTTTAAAAACACATGAT
CACAA
96 CYP3A4_RS2257401

(SEQ ID NO:87)

TCAGGGAGGGCTCCCTTCCCAGGGGCCTCCTACCTTTCAGGGAGGAACTT
CTCAGGCTCT(G/C)TCCAGTACTTTGGGTCATGATGAAGAACATAGCTT
GGAATCATCACCACCACCCCTTTGG
229 CYP3A7RS2687075

(SEQ ID NO:88)

TGCTGTCTCCAACATTCACCAGCGGAAAACTCAAGGAGGTATGAAAATAA
CTTGGGTTTTAATTAGAAACTTAAAGAATGAATCAGGTGGGGACAGGTAG
AAAGTAAGATCAGAGTTCCTTTCCGAGGAGTAGTCTGCTGAATTTGAGCT
TCCTAAAAATAGTCTTTTTATGTACAGAAAACACATCATAAAATTCATTA
(T/C)ACAATGTCACTTATTGTTCCATGCCAGGCAAAGTCATGTCCTTCT
GGGACTTATGTCTGCACATTTAACTATGGGTGGTGTTGTGTTTTGTGCTT
AGATGGTCCCTATCATTGCCCAGTATGGAGATGTGTTGGTGAGAAATCTG
AGGCGGGAAGCAGAGACAGGCAAGCCTGTCACCTTGAAACAGTAAGTAGG
AGCAC
233 CYP3A7RS2687076

(SEQ ID NO:89)

TTTTATGTATATAACAAAAGCCCTGCTTTTGTGNNNNNNNNNNNNNNNNN
NNNNNNNNNNNNNNNNNNNNNNNNNNNNNATACAAATCCTGCTTTGTAAC
TGTTTTTGTTTGTATATATAACAAAAAGAGTTATGAACCAGAAGTTTGGC
CAATAATCCTTGTCGCACAGAGAATTTGCTTTTTCTATCTGTTTTCACTT
(C/T)CTTGGTTACAGACGTGTAACCTCTTTTTTGAATGGTGACAATCAC
TTTGTCATATTTTATTTGATGCTAGTGGTCATAGCCTATTAGTCATGTTT
GCTTCCATGAGAAAGAAAAACCACTACATGGTTATGCTAAGGATTTCAGT
CATTGGGGTTAGAGCCTTCCCGAATGTCTCCTGCTTTCATAACTCCTCCA
CACAT
364 CYP3A7RS2687143

(SEQ ID NO:90)

AACAGGAAGGTTTTTTTTTAAGTTTCAGTGCAAACTCGGAGCAAGTGTCA
TAATTTTCTGTCTCCGATGTGTAGAGGTGACATTTTCTCAGAACTTTCAT
GTTAAGCTGGAAAACTGGAAAGCGAGTCCACTTTGTCATTCTGTCACTCA
CTCATTTTCTCACTCAACAAACATGCCTCACACTTATCTAAATCTGCTAG
(G/A)CTAAAAGAGGTCCCTGGTGTCTGTAACTTTCTAATTCTGCTAGAA
TTCTAGAGTGAGCTCATGAAATAAATGAAAAGGATGAAGAACAAAGAGAA
AAAAGACTGCACGTTCCCTTCTGGCGCTCACTCACATTCCCTCAGCCTCA
GTTTCTCCACATGCCCCTAGAGGTGATCATTCAAGGATTTATGAGATTTT
AGAGA
381 CYP2C9RS2253635

(SEQ ID NO:32)

CTCACAGCAGTACTCCTAAAATTAGATGGCTATAGGATTATACAAATCAC
CTTAATTCTTAACCCCCTAACAGAGTTTATAGCTTATTCCTCCTTCTTAC
TATCCTTTTGAGAAATAATCATAACAAGCTCCTTTTGTCTGTGCCAAACT
GATCTAAAATCACTCATTACTTTTCCATAAGCCACATGGCACTTGTTATC
(A/G)TAGCTTTTCTCATTCAAACCCCCTGAAGTTTTACCAGTGCAACTT
CCCTAATAACTGCCCACAGACTAACCTCATCCCTATTATTCTGCCTTGCA
AACTCAAACTACAAACGAGTTCACAGCCAAACCATACTACTAACACAAGG
CCTTCAAACACTTCTCTCCCTGATAGCCATGTGATGACTCCTAGCTAGTC
TTGCC

[0122] These results demonstrate that an inference can be made as to whether a subject is likely to have muscle adverse effects due to treatment with a statin by examining the SNP at positions as indicated in SEQ ID NOS:1-90, above.

### EXAMPLE 2

### Polymorphisms Associated with Response To Treatment with an Ace Inhibitor

[0123] This example demonstrates that the examination of the genotype of an individual allows an inference to be drawn as to whether treatment of the patient with an angiotensin converting enzyme (ACE) inhibitor is likely to result in an adverse effect to the subject.

[0124] ACE inhibitors are used to reduce the risk of cardiovascular disease, but their use is associated with a dry, persistent cough in a significant number of patients. The cough is very uncomfortable for patients and often is a primary cause of patient non-compliance. Patients experiencing such side-effects are routinely discontinued on ACE inhibitor therapy in favor of Angiotensin receptor blockers, or switched to another ACE inhibitor.

[0125] Patients with primary airway disease such as asthma and COPD are at an increased risk of developing cough or bronchoconstriction as a result of ACE-inhibitor therapy (Packard, 2002), and the incidence of the side effect appears to be a function of the genetic constitution of the individual. The metabolism or action of ACE inhibitors have been postulated to cause the generation of nitric oxide (NO) in the bronchial cells, which is a proinflammatory substance on bronchial epithelial cells. Using a randomized, double-blind, placebo-controlled trial, Lee et al. (Hypertension. 38:166-70. (2001)) tested the hypothesis that supplementing iron, an inhibitor of NO synthase, may reduce the cough associated with ACEI use. In this study, iron was used as a supplement in an attempt to ameliorate the cough reaction, which was hypothesized to be a biochemical means by which to counter NO increases. A significant reduction in cough scores was obtained with iron supplementation (P<0.01), but not with placebo. Although iron supplementation can alleviate the adverse effect due to ACE inhibitor treatment, it would be preferable not to have to treat patients with a drug that requires another medicine to counteract potential adverse side effects of the first drug. Instead, it would be preferable to identify those patients at risk for the side effect so that an alternative treatment can be prescribed.

[0126] Mukae et al. (J. Hum. Hypertens. 16:857-63 (2002)) identified polymorphisms in the bradykinin B2 receptor gene (−58T/C, exon 1, I/D) that were associated with the cough side effect. Aside from this result, however, little is known about the genetic basis for this adverse effect. Since many ACE inhibitors are metabolized by gene products of the cytochrome P450 system, and possibly other gene products, a candidate gene screen and a whole genome screen were performed to identify markers associated with the cough reaction to two ACE inhibitors; Enalapril (Vasotec®) and Lisinopril (Zestril®).

[0127] For the Enalapril and Lisinopril studies described below, a set of 205 xenobiotic metabolism SNPs, including SNPs in the AHR, CYP1A2, CYP2B6, CYP2C8, CYP2C9, CYP2D6, CYP3A4, CYP3A5, GSTM1, GSTM3, HMGCR, MVK, PON1, PON3, CYP1A1, CYP2C19, CYP3A4, CYP3A7, CYP2E1, CYP1B1, CYP2A6, CYP4B1, and GSTP1, was screened.

### Enalapril Study

[0128] For Enalapril, CYP2E1, CYP4B1 and CYP2C8 showed multiple hits (see Table 7) The CYP4B1 markers are in linkage disequilibrium (LD) with one another, as are the CYP2E1 and CYP2C8 markers, but the LD is not complete for any of these three genes. The clustering of associated markers to specific gene regions indicates that the associations are not spurious SNP associations, but are associations between a gene region and trait value (adverse response).

TABLE 7
ENALAPRIL PHARMACOS

| Delta | Marker | |
|---|---|---|
| 0.168981 | 198 | CYP2E1RS2070675_TC |
| 0.151416 | 143 | CYP4B1RS2405335_TC |
| 0.141745 | 74 | CYP2E1RS915907_CA |
| 0.135854 | 127 | CYP4B1RS1890251_TC |
| 0.129855 | 362 | CYP2C8_2071426_GA |
| 0.129167 | 132 | CYP4B1RS1890250_TC |
| 0.127594 | 343 | CYP4B1RS751027_GA |
| 0.12605 | 194 | CYP4B1RS681840_TC |
| 0.123532 | 2760 | CYP2C8_2185571_TC |
| 0.119907 | 50 | CYP4B1RS837395_TA |
| 0.118112 | 391 | CYP2C8_RS1934952_GA |
| 0.114815 | 2655 | PON1E6-5_157_869819_TC |
| 0.104562 | 2642 | 2C9E2E3_394_869797_TC |
| 0.098349 | 97 | CYP4B1RS2297812_GC |
| 0.094729 | 207 | CYP2A6RS1809811_TC |
| 0.093649 | 265 | CYP2C8E8_92_GA |
| | 138 | CYP2C8E2E3_248_TC |
| | 176 | CYP4B1RS1572603_TC |
| | 171 | CYP4B1RS632645_TC |

[0129] Ranking of the markers shown above based on p-values revealed that most have significant p-values (p<0.05; using the chi-square test or the exact test—see Table 8). As indicated in Table 8, alleles for each of these markers are in Hardy-Weinberg Equilibrium.

TABLE 8
ENALPVALUE

| Marker # | P-ChiSq | ChiSq | P-Exact | HWE:ChiSq | HWE:P-Value |
|---|---|---|---|---|---|
| 198 | 0.0018 | 9.7852 | 0.0018 | 1.1548 | 0.2825 |
| 74 | 0.0063 | 7.4768 | 0.0029 | 0.7565 | 0.3844 |
| 132 | 0.0112 | 6.434 | 0.017 | 1.6281 | 0.202 |
| 343 | 0.013 | 6.1727 | 0.0166 | 1.5588 | 0.2118 |
| 127 | 0.014 | 6.0351 | 0.0252 | 0.4433 | 0.5055 |
| 143 | 0.0142 | 6.0152 | 0.02 | 1.0076 | 0.3155 |
| 50 | 0.0205 | 5.3725 | 0.0354 | 1.1791 | 0.2775 |
| 207 | 0.023 | 5.1693 | 0.0328 | 0.7001 | 0.4027 |
| 194 | 0.0256 | 4.9842 | 0.0435 | 0.5302 | 0.4665 |
| 265 | 0.0264 | 4.9286 | 0.0192 | 0.454 | 0.5004 |
| 138 | 0.0494 | 3.8608 | 0.0323 | 0.3863 | 0.5343 |
| 362 | 0.0617 | 3.4921 | 0.0636 | 3.3024 | 0.0692 |
| 2760 | 0.0721 | 3.2356 | 0.084 | 3.465 | 0.0627 |
| 2655 | 0.0781 | 3.1033 | 0.0945 | 1.7688 | 0.1835 |
| 176 | 0.0892 | 2.8896 | 0.0526 | 1.0068 | 0.3157 |
| 391 | 0.0974 | 2.7483 | 0.1059 | 1.5098 | 0.2192 |
| 171 | 0.0987 | 2.726 | 0.1283 | 0.418 | 0.5179 |

[0130] Markers 138, 176 and 171 did not have delta values above the cut-off value, but had p-values near 0.05 and, therefore, are included in the list of sequences useful for inferring an adverse effect due to Enalapril. The SNPs from this screen were used to construct a classification system, whereby patients were given a non-responder score (−1) if they possessed a genotype for a given SNP associated with non-response, and a responder score (+1) if they possessed a genotype for a given SNP associated with response (and no score if they possessed neither). As shown in Table 10, adverse responders (case) were classified with 98% accuracy, and 93% of the time an individual was predicted to be a responder, the individual was, in fact, a responder.

TABLE 10
Classification results Enalapril -
candidate gene segment of the study only.

| | INTO | INTO | |
|---|---|---|---|
| | CASE | CONTROL | |
| CASE | 41 | 1 | 0.97619 |
| CONTROL | 13 | 14 | 0.518519 |
| | 0.759259 | 0.933333 | 0.797101 |

[0131] Regions of the genes, including the SNP positions, for markers as set forth in Tables 8 and 9 are set forth below (indicated by “marker name”—see Table 8). The SNP position, and polymorphism, is indicated by brackets [ ].

CYP4B1RS2405335

(SEQ ID NO:91)

CTTGGGCAGGGATTCTTACTGGGTGAAGGTGCTGGGCAGGCACCCTGTGT
GCTGGGAATCCGAGACCGACATGACCTGCCTTGAGGGAACTATGACATGC
TGCCGAAAAGGAAACCCCTTCGTCTTTCTCCTCCCTCACCTTTGTTTTCG
AAACTCTTATCCCCATTTTGTGAGCAGACTGATTTTCATCTGAAGCAGCC
CCTGGGGCACTGTAGCTGCAGCACACTGGTCAAGGGTAGCTTGTTTCTTG
GACACTGGCCCCACTGAGCTTCGGGTCAACTGGCTGATGGCTTGAGCAGG
CTTGCTAACAAGGGCTGCAGAAAGAGACTAAGCCAGGATCCCTGGTCTCC
CTTAACTCA[C/T]GCTGGACTGTTCCCTTTGGTCTTTGTACCGCACGTT
TCCACCTTTAAAGAGAGGTCAGGGTTCCACTAGGCAATGTTGAAATCCTT
TTCCGATCTGATTCTTGGAGCAAAGCTTACTTTAGGCTCTTGAGAAGCAG
AGAGGAAAGTGGTGACGTATGCTTGCTCTTCCCAATCCCTCCAGTGGTTT
ATTTCTGGTGAGGTCAACAAGGAGTGCCAATGTGAGGGTGGGAGGTGGGG
CTGGGGAGCTGGGATCAGTGAATTATTTTCATACCCTGCTCTCTTCCTGT
TTCCTTCCTTCTGGAGAAAAAACAAGCCGTCCCAGAACTTCCAGTCCTGT
AAGTGTCCCAGCTCAGGCATTCTGAGGGCGAGTCTGAGGCATGCAGTTGT
GTAATCCAGAGGAACTGTCCAGGCAGTCACGTGTACCCCACAGGGAGGAT
GCCTCAGCCCTCTTGAGGGGCTGCAGCTGCAATAGTGGGACCAGGTGCTG
GGAGCTGTCCTC
CYP2E1RS2070675

(SEQ ID NO:92)

GCAGACTTTGAGAATTGCATTTTGTCTGAGGAGAAGCCCTCAGCCTTCCT
TGTGGGCATG[C/T]ACTCCCCAACTGTGCGCAGCTGCAGGACTTCCAGG
CCTCCCCAGCTTCATCCACCTGCAG
CYP2E1RS915907

(SEQ ID NO:93)

CGTGCAGGACTTCCAGGCCTCCCCAGCTTCATCCACCTGCAGGTGCTCAG
GATCCTGATCCCCTGCCCCCTTCCCACCTTGGTGAAACTTCTTGTATCCT
TGTCTTGTCCTTTCCTATGGCTTGTGGCTCAAGAACAAATGTGGAGCCCA
CACTGATTTCCCAGGACTGTCTGAGCATCTTCTCCACCAGTTTGGCCCCT
CGTGGCAGCAGA[A/C]ACTAGCCCTGTAGCAGGAGGGGTTAGCAGGAGC
CGTTTAGCTCCTGCCTGAGCTATGACCAAGGTCAGGGGGATCTCACCTCT
CCCAGGATGGCCCTCATGCTGTGGAGGGAGACAGAGCCCTGGCCTGCCCT
CAGCAGATTTCTGGGAGCCTCAGTTTCCCTGGCTGTGAGTGGAGATGACT
CTGTCTGTCACAGCTCCAAGTCACAGTTCCACTGGGAGAGCCTCTTGGAC
ACTGTCTCCTGTGTCCCTGTGGAGCTGGGAGGTGGCTGGTTCTGTGCTGA
AAGGAGACAAGCAGCCCCTTCTCTCCGGTCTGTCTCCGGTATCACAGGAA
AAGCACAGTGCAGAGCGCTTGTACACAATGGACGGTATCACCGT
CYP4B1RS1890251

(SEQ ID NO:94)

TCCACCCACAGGCAAGGGGAAACATTCTTGTATGCCTGCCTCCCTCCTGG
CTGGTATCCCTGGAAGTGCTCCTTTCCCTGGTGTCTGTCTTATTTTTCCA
TCTGCCCTCCTGGGTTTTCCTTGCCAACTTCCTGGTCACCTGGCCATTCC
CCTTCTCTCCATCCCTACCAGGTCCAGAAAGCCCAATTGGATGGGTCAAG
GAAAGGCTTAAGTCACAAAAAAGCCNNNNNNNNNNNNNNNNNNNNNNNNN
NNNNNNNNNNNNNNNNNNNNNNNNNTCCAAGCCCCACTTCCCTCCTTATC
AGCTATGCTTGTGCACCTCTGCAGCAACCCCACAAGGGACAGTAGACCCT
GGTCTCATGCTGACCACATTCACAACCTGTGCCCTGATCGAGGTCGCAGC
CAGCTTGCCACTGCCTCCCTGTGCCCAGCTTTCTCCTAGCTCTTTAGATT
TATTTAAGAAATAAAGAAAACTAAGATAAATAAAAAACATGTGCATGAGC
CCAAGCGATGGCCAAACTTTTAAATAAAG[C/T]TAGAGAACTAGAAGCA
CCTGCCAGGCACCTGCCTTGATTACCCCGGGAGCCTGGTAAGAAGGAGGA
CAGCTCCCAGCACCTGGTCCCACTATTGC
CYP2C8_2071426

(SEQ ID NO:95)

TTTGTCTTTCTAAGTCTGTCATTGTCAGAAATAGCGGAGTGAGTTGATGC
ATTTTGTGAATACAGAAACATTGGGGTCATTGTATTATATAATCATTTAA
TACAGTGGCAAAAGTTTAAAGTGCTGTTTCTCCTCTTTGTTTCACAGTGT
TTTGCTATGATTTTTGACTGAAGGTGAAGGGAAGTGTGTGTGATTAGAAA
TTTCATCCA[A/G]TAAGTTCTCTACTATAGTAGTCATGTGTTTTATTCA
GAATGGTCATGAAAATTGAACTTCTCTGAAGATTCATTTGATGGCTGATG
TGAAATAAATATCTGTGGGTTCAGGGCAAACATAAGTGCATGAAAGAAAG
AAGTAATCAGTCAGGGCCCAATAGGTAGTTAACAGAATTCTTTTGGATTC
TGAAGAAAGCCACTGTCTGTGGCCAAGGTTGCTGGAGAATGGAAGAAATT
GTTCTTCCAGGAGATGCTGAATGTCCTGATTCTAACTTTGTGGTGCTTCA
TCGTTCCATATTGGTAATAC
CYP4B1RS1890250

(SEQ ID NO:96)

TCCACCCACAGGCAAGGGGAAACATTCTTGTATGCCTGCCTCCCTCCTGG
CTGGTATCCCTGGAAGTGCTCCTTTCCCTGGTGTCTGTCTTATTTTTCCA
TCTGCCCTCCTGGGTTTTCCTTGCCAACTTCCTGGTCACCTGGCCATTCC
CCTTCTCTCCATCCCTACCAGGTCCAGAAAGCCCAATTGGATGGGTCAAG
GAAAGGCTTAAGTCACAAAAAAGCCNNNNNNNNNNNNNNNNNNNNNNNNN
NNNNNNNNNNNNNNNNNNNNNNNNNTCCAAGCCCCACTTCCCTCCTTATC
AGCTATGCTTGTGCACCTCTGCAGCAACCCCACAAGGGACAGTAGACCCT
GGTCTCATGCTGACCACATTCACAACCTGTGCCCTGATCGAGGTCGCAGC
CAGCTTGCCACTGCCTCCCTGTGCCCAGCTTTCTCCTAGCTCTTTAGATT
TATTTAAGAAATAAAGAAAACTAAGATAAATAAAAAACA[C/T]GTGCAT
GAGCCCAAGCGATGGCCAAACTTTTAAATAAAGCTAGAGAACTAGAAGCA
CCTGCCAGGCACCTGCCTTGATTACCCCGGGAGCCTGGTAAGAAGGAGGA
CAGCTCCCAGCACCTGGTCCCACTATTGC
CYP4B1RS751027

(SEQ ID NO:97)

GTTTATATCAATATGAAGAGGGATGCCCTGTGGAGGCAGCCCCTCCTCCC
TGCAGGCCCACCAAGTGATTTTTACATTGAAATCAGCAAACCAGAGCAAA
AAGAACCAGATGTAGCAGGTCATGGGAGGAGACTCTGCCACGGAATTCTC
CAAATCCAGTACTCGAGGATCCCATACCCAGACACTGACAGGTGCTGCCC
[G/A]CCACTGAGCCTCCTCTTTCTGGGTCTCAGATGCCCACATTTTAAA
ATTGAGACATAGAAATTCATTCCTCCTGTTTACAATCCAGTCTTATGGCT
CTCCTTTGATGACTTTCGCTAGATTCTGCTCTAGTCCAGCTGTGTTGATG
CCTCCAATTAACAGAGCTCCAAGGGTAATCCTTGTTTCCTTTTCCTGCTA
CATGG
CYP4B1RS681840

(SEQ ID NO:98)

GCCCCAGGGTGTTTTGTAGCAAGAATCCCTCTATGATGATTTAACACCTG
ACGTTTATCTGCCCAGTAGTTTGCAAAATACCTATACTTTATCTCTTTCT
ATCCCCTTCTNNNNNNNNNNNNNNNNNNNNNNNNNNNNNNNNNNNNNNNN
NNNNNNNNNNNNNNNNNNNNNNNNAAAGTGGCTTAGCTAACTGGGCACAG
[C/T]GAAGGCCTGTAATCAATGTTTACTGAATGAAAATGAGCCACAGCC
CTGTCTTCACTACACAGCACAAGGTCAAGGGCACTCTCACAGCAAAGGGC
ATGGCTGGGAAAGAGGCCTCTGCAGTCTCAGAGTATCTCATTTCCTTGAT
CTGGGAGCTGGCATTCT
CYP2C8_2185571

(SEQ ID NO:99)

TTAGGACCTATAGATGTGAATTTGGGCACCCTTTCCATTTATGTTCACTA
GTCACTTGGTTACAGCAATTTCATTTTAGAGATTCCTTCACCGAATAAAA
GCCTTTTTAATAATTTCTTTACCTGTAAAATTACAGATTTGGCCTAACTT
ATGGTCAAATTTAAAACTTTATTAAAACATACTTATCTTGATGACTATAC
TGAATAATATCCCAGAATCCACAAGAGTAGTTTTGCCCAAATGAATTAAA
TTTGGAAGATGATTGGAAATGATAAACATTATTTCCAAAGGAAGGAAATT
CATTTTTTACAAATTGAAAAAATAAATAAAAAGATTCCATTTATCAATTT
ACTTTTTGGTTAGCTTTACTGGGATTTAGATTTGAAATAAAAAGTTAGCA
TTTTACTTATTTAGATAAACAAATCTGTTATACTTAATGCTCATTTATAT
TAGTTTTTCTTCTCATATCATATGGATGTACTTGCTTTTCACATTTGTTC
CCTAAAACACATGAATTCACCCACAATCTCCCTAACTTTATTCCCATTGG
TTCAGCACATTATACTTTCAGCTATATGACATTTCTAGGTCCCCAACTTT
TCTCTTCCTATCTCTGTGTTTTATTGTCCAGAGGCTTTGCAAACAGACAT
GATTCTGCTCTAAAAACTTGAATTATTAGGATTTCAAAAAAGTCTTCTTT
TTCCTTCCAAAATAAAAGACACTTGG[A/G]GTTAAAAGAGTTTAAATAA
AGGCAGTGGATGTGAATAACCACATGCGAAATGACATTGTTTAGCTAGCC
TGTAATGCTCAACTCATATTTAAGGTAAAAGTAATGTGTTTATTTCATCC
ATGCTGATTTTTTTTGGACACATGGGGAATTTGTAAGATATTGTTTAAAA
TTTCTAAATTTCCTTTATGTCTTAACAAATGCAAATC
CYP4B1RS837395

(SEQ ID NO:100)

CCCACCCAAAAACTAGCCAGGAATATGGAATGTCGTTTTCTCCATGGTTT
ATATCAATATGAAGAGGGATGCCCTGTGGAGGCAGCCCCTCCTCCCTGCA
GGCCCACCAAGTGATTTTTACATTGAAATCAGCAAACCAGAGCAAAAAGA
ACCAGATGTAGCAGGTCATGGGAGGAGACTCTGCCACGGAATTCTCCAAA
[T/A]CCAGTACTCGAGGATCCCATACCCAGACACTGACAGGTGCTGCCC
GCCACTGAGCCTCCTCTTCCTGGGTCTCAGATGCCCACATTTTAAAATTG
AGACATAGAAATTCATTCCTCCTGTTTACAATCCAGTCTTATGGCTCTCC
TTTGATGACTTTCGCTAGATTCTGCTCTAGTCCAGCTGTGTTGATGCCTC
CAATT
CYP2C8_RS1934952

(SEQ ID NO:101)

CTTGCTTTTCACACCTGTGTTTTGTGTGCTAAGTCTCTGGCCATGGAATC
TCCTTCCTTTATTCTTTGATCTTTTATGTCTGCTTTATATTTGGCACTGT
AGATACCAACATGACAAGGACAGAGACCTTCCTTCAAGAATTCACATTTT
ACCACAATAGATAAATAAATACAGAATTACGATTCCTGGTAATCTGTGCT
TTAATGAAAGCATGAGTATGCTGTTGAGGAAAACCAGAGAGCATAGGATT
TGATTACTTGAGGGGATTGTAAAGAGTGTGAAGATGAAATGAAATTGAAC
CTATGTCCTGAATGTAGCCTAATAAAGATGTATCTTAGCCAAAATGAACA
ACAGGATATGAAACTTGAAACTTCATGGTGTGTTCAAGATTGATGAAGAG
AGTGTATGACCAGAGCTGA[A/G]AACAGATTATGTGAAAAGTGGAAGGA
AAAGTCATGGAATATCAGGCTTGGAACAGGAAACAAGAATGTGCATGTAT
TTCCATAATGACAGATGGAAACTCAAAATGGCAAAAGAGCTGTTTTAATG
TGGGAATAAATAA
PON1E6-5_157_869819

(SEQ ID NO:102)

AGAATATATTCCAAGATATCTCCTGAGAATCTGAGTAAATCCACTACATT
TCAGAGAGTTCACATACTTGCCATCGGGTGAAATGTTGATTCCATTAGCA
AAATCAAATCCTTCTGCCACCACTCGAACTTCACTTGGACTATAGTAGAC
AACATACGACCACGCTAAACCCAAATACATCTCCCAGGAT[C/T]GTAAG
TAGGGGTCAAGAAAATAGTGATCATTTGTGCCATAAAAGTGCTCAGGTCC
CACAGCAACAATATCATTCAAACTGCAATTAAAACATACACACATAATAT
ATAAGGTGAAGGTATTGAACATTACAGGATTATTAACTGGCATTCCTCAC
TGTC
2C9E2E3_394_869797

(SEQ ID NO:103)

TGATTGATCTTGGAGAGGAGTTTTCTGGAAGAGGCATTTTCCCACTGGCT
GAAAGAGCTAACAGAGGATTTGGTAGGTGTGCAWGTGCCTGTTTCAGCAT
CTGTCTTGGGGATGGGGAGGATGGAAAACAGAGACTTACAGAGC[C/T]C
CTCGGGCAGAGCTTGGCCCATCCACATGGCTGCCCAGTGTCAGCTTCCTC
TTTCTTGCCTGGGATCTCCCTCCTAGTTTCGTTTCTCWTCCTGTTAGGAA
TTGTTTTCAGCAATGGAAAGAAATGGAAGGAGATCCGGCGTTTCTCCCTC
ATGACGCTG
CYP4B1RS2297812

(SEQ ID NO:104)

ACGATACGGCAGGGGTGGAATTGAGGCCATTTCTCTATTGCACAATGAGC
AAATATTACCTATCTTTATAATTAAAGAGCTTTAATGTGGAGAAGAAAGC
ACTTTCTGGCTGCAGTGCAGTAGAGAGTTGGTGGCAGGTGCTAAATGGAA
GCAGGTTGGCTACTTTGGGGATGTTGAGCTAACCCCGGTGTGAGAAGAGG
GCGGCTTGGAATTAGAGCAGTGGTTGTGGGGCTGGAGAGGGGACTAAGCC
CAGGGATGTTTAGGAGAAGAGGGTGCAGGAGAGGTAAGGAAGCAACCAGG
GCCTGCCTGGGCAGCCTTCTCCCCTGCCCTCCCAGGGACTTGGGGCCTAG
CTGGTGACAATGTGTTCCTGAGTGACCTTGGCCTTCTGTCATCATTTCAG
ATCCAGGAGACGGGGAGCCTGGACAAAGTGGTGTCCTGGGCCCACCAGTT
CCCGTATGCCCACCCACTCTGGTTCGGACAGTTCATTGGCTTCCTGAACA
TCTATGAGCCTGACTATGCCAAAGCTGTGTACAGCCGTGGGGGTGAGGAG
AGAGGATGGGGATCTCAGGAGAGGGTGGGGCTTCCTGAGAACAAAGGGCT
CAGGGCATGATATGGGGAGGAAGCCTGGGCCTGTGTACTAAGTCTGCG
[G/C]AGCTGAGGTTCCCACCCTACTCATAAATGAGCCTCCTCTAGGAAC
CCCGGGTCCCTGCTTGACCTGATTGTCTCCTCCTGCAGACCCTAAGGCCC
CTGATGTGTATGACTTCTTCCTCCAGTGGATTGGTGAGTGAGCACCTGCC
TTCCCTGCCCTGCCAACCTCAGACCCGTGGTGCTGGGTGACTAGGATCCT
GGCCTGTCCCACTCAATTGGTTATCCCAGATGGCCTAGTTCTCGGGTGCC
CATCCTAAGCTCAGCTGCTCAGTGGAGAGACAAGGGAGGAGCAGGAGAGC
CCCCAGCTGTGGGGCCAAGGCATCTTCTCTGGCAGGGCCTGATTCTCTAG
ACAGGGCAAAGGCTTTGGAGAATGTGTGAGTGCGAAGAACAGTTTCCTGA
AGGAGGTGGCACTAGAGTTGATCCAAAAGGAGATTTAAATAGGTAGTGCT
GGCCAGGGCAAGGGCCTAAGGAAATGGTGTGGTGGTAGGACCACGGCTGG
TCACCAGAGGCTGTGAGGCTGTCGGGGTGGCTACAAGGCAGAGCCC
CYP2A6RS1809811

(SEQ ID NO:105)

TGTTCCCCAACCCTTTCCAATCACACACCTTACAGAGGTGCTCCCAGTGC
ATCCCACTTGGATAGGTAAACACCTCAACAGGTATCCCCTCCACTTCAAC
ATCTTCACCAGCCCCACTTTAATACCTGAGCACCTGAACAAAAGCCCCCA
ATCCAGACCCAGTAAGTATCTGGACAGCTGTCTCCAACCAAGCCTACTTG
AATGCCTAAATACCTAGACAGGTGACACTCACCTCATACCAGCCCCACCT
GAAGAGCTAAACACCTGGACAGGTGTCTTCCAACTCAACTTCACTTGAAT
ATCTGAACACCTAGATGTGTGCTCCAATCCAGCCTCGTTTAAATACCTGA
AACCTGGATATATGTCTCAGTTCTTCTCACCTAAATTACTAGACCGTGGC
CCTGGTACCTAACCTTCCTGAAAACTTAGATATAAGTTCCTATCCGGCCC
CACTGAAATACCTAAACAACGAGACAGATGCCTTTAACTCAGTTCCTTCC
TTGCTATGAAACAAATCCCATTCCCATCAGCTCCTGCCCCGTGACAGCTG
TCCTTCCCTTCCCATCCTCTCTCTGCAACCCCAGCTCTATGAGATGTTCT
CTTCGGTGATGAAACACCTGCCAGGACCACAGCAACAGGCCTTTCAGTTG
CTGCAAGGGCTGGAGGACTTCATAGCCAAGAAGGTGGAGCACAACCAGCG
[C/T]ACGCTGGATCCCAATTCCCCACGGGACTTCATTGACTCCTTTCTC
ATCCGCATGCAGGAGGTACACCCCAGCAGCCACTGCGGGGAGATGCAAAG
CCAGGCAGAGGGAAATCAGTCTGGGAGTGGGGCAGGCAGATGACACAGGC
CCATTCAAATTAACCCTCATCATAATAATCCTCACAATT
CYP2C8E8_92

(SEQ ID NO:106)

TTCTTATAATCAGATTATCTGTTTTGTTACTTCCAGGGCACAACCATAAT
GGCATTACTGACTTCCGTGCTACATGATGACA[A/G]AGAATTTCCTAAT
CCAAATATCTTTGACCCTGGCCACTTTCTAGATAAGAATGGCAACTTTAA
GAAAAGTGACTACTTCATGCCTTTCTCAGCAGGTAATAGAAACTCGTTTC
CATTTGTATTTAAAGGAAAGAGAGAACTTTTTGGAATTAGTTGGAATTTA
CATGGCACCTCCTCTGGGGCTGGTAGAATTGCTA
CYP2C8E2E3_248

(SEQ ID NO:107)

ATCTCCCTCCACCACCTGAGGGCTGACAACCAGGATGCGCAATGAAGACC
TGGCCACCCCTGAAATGTTTCCAAGGACGTCACTAGTGAAGACAGGTAAC
TGTTAAGGTCAATGACGCAGAGTAGAGTCACCCACCCTTGGTTTTTCTCA
ACTCCTCCACAAGGCAGTGAGCTTCCTCTTGAACACGGTCCTCAATGCTC
[C/T]TCTTCCCCATCCCAAAATTCCGCAAGGTTGTGAGGGAGAAACGCC
GGATCTCCTTCCATCTCTTTCCATTGCTGGAAATGATTCCTAATAAAAAA
AGGGGCAGAAACTGGGAGAATTCACAGCCAAGGAAGAAAGTGCTGCAACA
CTCGGCAGCCATGCAGATAGGCTAAGCTCTGCTGAGAAGCTTTTTAGGGC
TCTG
CYP4B1RS1572603

(SEQ ID NO:108)

GAAGGAGGACAGCTCCCAGCACCTGGTCCCACTATTGCAGCTGCAGCCCC
TCAAGAGGGCTGAGGCATCCTCCCTGTGGGGTACACGTGACTGCCTGGAC
AGTTCCTCTGGATTACACAACTGCATGCCTCAGACTCGCCCTCAGAATGC
CTGAGCTGGGACACTTACAGGACTGGAAGTTCTGGGACGGCTTGTTTTTT
CTCCAGAAGGAAGGAACAGGAAAGAGAGCAGGGTATGAAAATAATTCACT
GATCCCAGCTCCCCAGCCCCACCTCCCACCCTCA[C/T]ATTGGCACTCC
TTGTTGACCTCACCAGAAATAAACCACTGGAGGGATTGGGAAGAGCAAGC
ATACGTCACCACTTTCCTCTCTGCTTCTCAAGAGCCTAAAGTAAGCTTTG
CTCCAAGAATCAGATCGGAAAAGGATTTCAACATTGCCTAGTGGAACCCT
GACCTCTCTTTAAAGGTGGAAACGTGCGGTACAAAGACCAAAGGGAACAG
TCCAGCATGAGTTAAGGGAGACC
CYP4B1RS632645

(SEQ ID NO:109)

CTTGCCTATGCTTTCTCTCAAGAAAGCTTCCAGTGTCCCCTTCAATGTGA
ACCCTTAAGAGAGCTGGCATTTATGCTAGGCTCGCAATGCTTTGAGTTCT
TTTTTGTGAGGCACCTTCAGAGACAAGGTTCTAGCCCCAAAAGGGAAATA
CCAGG[T/C]CAGAAAGGGGCCAACTCCACCCCTAAAACAATAGTGCCAT
TTTGACACTTAGGAACATAGAACTTTCAGGGTGATG

### Lisinopril Study

[0132] For Lisinopril, CYP2D6, CYP2B6 and PON1 showed had multiple “hits” (see Table 11). Markers within each of these three genes were in LD, but the LD was not complete and the information carried by one was not completely redundant with the information carried by another. The clustering of associated markers to specific gene regions showed that the associations are not spurious SNP associations, but are an association between a gene region and trait value (adverse response).

[0133] P-values for some of the markers are shown below in Table 12 (LISINPVALUE), which provides a ranking of the top p-values from all of the 205 xenobiotic metabolism markers screened. The sequences for all of the SNPs in Table 11 are included in the list below.

TABLE 11
LISINOPRIL
LISINOPRIL PHARMACOS

| Delta | Marker | |
|---|---|---|
| 0.19697 | 2620 | 2D6E7_286_554365_CA |
| 0.171875 | 423 | CYP2D6_RS769261_GT |
| 0.171875 | 2699 | CYP2D6_RS2856955_GA |
| 0.166667 | 2700 | CYP2D6_RS2854740_GA |
| 0.151515 | 324 | CYP2B6RS2279343_GA |
| 0.141711 | 188 | CYP2B6RS1042389_TC |
| 0.140625 | 2709 | CYP2D6_RS2743459_GT |
| 0.121212 | 73 | CYP1A2_RS762551_CA |
| 0.107143 | 2686 | PON1E2-5_328_869817_GA |
| 0.101604 | 2618 | PON13UTR_eye_886925_CA |
| 0.100267 | 330 | CYP7PE1_580_GA |
| 0.093137 | 58 | GSTP1E2E4-5_419_CA |
| 0.092979 | 172 | CYP2D6_RS2267446_TC |
| 0.091398 | 205 | CYP2E1RS2480259_TC |
| 0.090909 | 2672 | CYP2D6_RS2004511_GA |

TABLE 12
LISINPVALUE

| Marker # | P-ChiSq | ChiSq | P-Exact | HWE:ChiSq | HWE:P-Value |
|---|---|---|---|---|---|
| 2620 | 0.021 | 5.3279 | 0.0333 | 0.0299 | 0.8627 |
| 324 | 0.0423 | 4.125 | 0.0623 | 0.2398 | 0.6244 |
| 2699 | 0.0437 | 4.0683 | 0.0578 | 1.5219 | 0.2173 |
| 423 | 0.0484 | 3.8964 | 0.0762 | 2.00E−04 | 0.99 |
| 2700 | 0.0539 | 3.7167 | 0.0788 | 0.1104 | 0.7397 |
| 188 | 0.057 | 3.6235 | 0.0755 | 0.4539 | 0.5005 |
| 2618 | 0.0901 | 2.8723 | 0.0752 | 0.645 | 0.4219 |
| 2709 | 0.0989 | 2.7234 | 0.1489 | 0.5088 | 0.4757 |

[0134] Based on the SNPs identified from this screen, a classification system was constructed, whereby patients were given a non-responder score (−1) if they possessed a genotype for a given SNP associated with non-response, and a responder score (+1) if they possessed a genotype for a given SNP associated with response (and no score if they possessed neither). As shown in Table 13, responders (control) could be classified with 96% accuracy, and 93% of the time an individual was predicted to be a non-responder (case), the individual was, in fact, a non-responder.

TABLE 13
Classification results Lisinopril -
candidate gene segment of the study only.
haplo counted once method 19 incons

| | into | into | |
|---|---|---|---|
| | case | control | |
| case | 13 | 11 | 0.541667 |
| control | 1 | 23 | 0.958333 |
| | 0.928571 | 0.676471 | 0.75 |

[0135] Regions of the genes, including the SNP positions, for markers as set forth in Tables 10 and II are set forth below (indicated by “marker name”—see Table 10). The SNP position, and polymorphism, is indicated by brackets [ ].

2D6E7_286_554365

(SEQ ID NO:110)

AGCCCATCTGGGAAACAGTGCAGGGGCCGAGGGAGGAAGGGTACAGGCGG
GGGCCCATGAACTTTGCTGGGACACCCGGGGCTCCAAGCACAGGCTTGAC
CAGGATCCTGTAAGCCTGACCTCCTCCAACATAGGAGGCAAGAAGGAGTG
TCAGGGCCGGACCCCCTGGGTGCTGACCCATTGTGGGGACGCRTGTCTGT
CCAGGCCGTGTCCAACAGGAGATCGACRACGTGATAGGGCAGGTGYGGYG
ACCAGAGATGGGTGACCWGGCTCRCATGCCCTRCAYCACTGCCGTGATTC
AYGAGGTGCAGCGCTTTGGGGACATCGTCCCCCTGGGTGTGACCCATATG
ACATCCCGTGACATCGAAGTACAGGGCTTCCGCATCCCTAAGGTAGGCCT
GGCRCCCTCCTCACCCCAGCTCAGCACCAGC[A/C]CCTGGTGATAGCCC
CAGCATGGCYACTGCCAGGTGGGCCCASTCTAGGAAMCCTGGCCACCYAG
TCCTCAATGCCACCACACTGACTGTCCCCACTTGGGTGGGGGGTCCAGAG
TATAGGCAGGGCTGGCCTGTCCATCCAGAGCCCCCGTCTAGTGGGGAGAC
AAACCAGGACCTGCCAGAATGTTGGAGGACCCAACGCCTGCAGGGAGAGG
GGGCAGTGTGGGTGCCTCTGAGAGGTGTGACTGCGCCCTGCTGTGGGGTC
GGAGAGGGTACTGTGGAGCTTCTCGGGCGCAGGACTAGTTGACAGAGTCC
AGCTGTGTGCCAGGCAGTGTGTGTCCCCCGTGTGTTTGGTGGCAGGGGTC
CCAGCATCCTAGAGTCCAGTCCCCACTCTCACCCTGCATCTCCTGCCCAG
GGAACGACACTCATCACCAACCTGTCATCGGTGCTGAAGGATGAGGCCGT
CTGGGAGAAGCCCTTCCGCTTCCACCCCGAACACTTCCTGGATGCCCACG
GCNNNNNNNNNNNNNNNNNNNNNNNNNNNNNNNNNNNNNNNNNNGCCTGT
GGGGAGCCCGGCTCCCTGTCCCCTTCCGTGGAGTCTTGCAGGGGTATCAC
CCAGGAGCCAGGCTCACTGACGCCCCTCCCCTCCCCACAGGCCGCCGTGC
ATGCCTCGGGGAGCCCCTGGCCCGCATGGAGCTCTTCCTCTTCTTCACCT
CCCTGCTGCAGCACTTCAGCTTCTCGGTGCCCACTGGACAGCCCCGGCCC
AGCCACCATGGTGTCTTTGCTTTCCTGGTGAGCCCATCCCCCTATGAGCT
TTGTGCTGTGCCCCGCTAGAATGGGGTACCTAGTCCCCAGCCTGCTCCCT
AGCCAGAGGCTCTAATGTACAATAAAGCAATGTGGTAGTTCCAACTCGGG
TCCCCTGCTCACGCCCTCGTTGGGATCATCCTC
CYP2D6_RS769261

(SEQ ID NO:111)

TGACTCTTGCAAGGTCATACCTGGGTGACGCATCCAAACTGAGTTCCTCC
ATCACAGAAGGTGTGACCCCCACCCCCGCCCCACGATCAGGAGGCTGGGT
CTCCTCCTTCCACCTGCTCACTCCTGGTAGCCCCGGGGGTCGTCCAAGGT
TCAAATAGGACTAGGACCTGTAGTCTGGGG[G/T]GATCCTGGCTTGACA
AGAGGCCCTGACCCTCCCTCTGCAGTTGCGGCGCCGCTTCGGGGACGTGT
TCAGCCTGCAGCTGGCCTGGACGCCGGTGGTCGTGCTCAATGGGCTGGCG
GCCGTGCGCGAGGCGCTGGTGACCCACGGCGAGGACACCGCCGACCGCCC
GCCTGTGCCCATCAC
CYP2D6_RS2856955

(SEQ ID NO:112)

CGCGCTATGGGCCCGCGTGGCGCGAGCAGAGGCGCTTCTCCGTGTCCACC
TTGCGCAACTTGGGCCTGGGCAAGAAGTCGCTGGAGCAGTGGGTGACCGA
GGAGGCCGCCTGCCTTTGTGCCGCCTTCGCCGACCAAGCCGGTGGGTGAT
GGGCAGAAGGGCACACAGCGGGAACTGGGAAGGCGGGGGACGGAGAAGGC
[A/G]ACCCCTTACCCGCATCTCCCACCCCCAGGACGCCCCTTTCGCCCC
AACGGTCTCTTGGACAAAGCCGTGAGCAACGTGATCGCCTCCCTCACCTG
CGGGCGCCGCTTCGAGTACGACGACCCTCGCTTCCTCAGGCTGCTGGACC
TAGCTCAGGGAGGGATCGAAGGAGGAGTCGGGCTTCCTGCGCGAGGTGCG
GAGCA
CYP2D6_RS2854740

(SEQ ID NO:113)

TGAGTGGAAAGGTGGTCAGGGTGGGCAGAGACGAGGTGGGGCCAAACCCC
GCCCCAGGCAGGGGAGCAATGTGGGTGAGCAAAGAGTGGGCCCTGTGCCC
AGCTGGACCGGGCTAGGGACTGCGGGAGACCTTGTGGAGCGCCAGGGTTG
GAGTGGGTGGCGGAGGGTGGGGCCAAGGCCTTCATGGCAACGCCCACGTG
[C/T]CCGTCCCGCCCCCAGGGGTGTTCCTGGCGCGCTATGGGCCCGCGT
GGCGCGAGCAGAGGCGCTTCTCCGTGTCCACCTTGCGCAACTTGGGCCTG
GGCAAGAAGTCGCTGGAGCAGTGGGTGACCGAGGAGGCCGCCTGCCTTTG
TGCCGCCTTCGCCGACCAAGCCGGTGGGTGATGGGCAGAAGGGCACACAG
CGGGA
CYP2B6RS2279343

(SEQ ID NO:114)

GTTCAGAGGCAGAGGGGAGTGGGGAAGTGGGGTTCCCATGGAGGGATTGG
GGCCCAGGAGGCGCTCTCTCCCTGTGACCTGCTAGCTCAGCCCTAGGCAA
ACCTCACCACCCCTTCTTTCTTGCAGCTGTTTGAGCTCTTCTCTGGCTTC
TTGAAATACTTTCCTGGGGCACACAGGCAAGTTTACAAAAACCTGCAGGA
AATCAATGCTTACATTGGCCACAGTGTGGAGAAGCACCGTGAAACCCTGG
ACCCCAGCGCCCCCA[A/G]GGACCTCATCGACACCTACCTGCTCCACAT
GGAAAAAGTGGGGTCT
CYP2B6RS1042389

(SEQ ID NO:115)

AGACCACAGTCACACACTGCTGTAGTCTTCCCCAGTCCTCATTCCCAGCT
GCCTC[C/T]TCCTACTGCTTCCGTCTATCAAAAAGCCCCCTTGGCCCAG
GTTCCCTGAGCTGTGGGATTCTGCACTGGTGCTTTGGATTCCCTGATATG
TTCCTTCAAATCTGCTGAGAATTAAATAAACATCTCTAAAGCCTGACCTC
CCCACGTCAAGAGGTGATCTGTGCCATTTTGTGTGTGATTCTTTTATTGT
CGGGTCTCTAGGGATTTTTCTGGAAGGAA
CYP2D6_RS2743459

(SEQ ID NO:116)

CTTCAGTCCCTCCTGAGCTAGGTCCAGCAGCCTGAGGAAGCGAGGGTCGT
CGTACTCGAAGCGGCGCCCGCAGGTGAGGGAGGCGATCACGTTGCTCACG
GCTTTGTCCAAGAGGCCGTTGGGGCGAAAGGGGCGTCCTGGGGGTGGGAG
ATGCGGGTAAGGGGTTGCCTTCTCCGTCCCCCGCCTTCCCAGTTCCCGCT
[G/T]TGTGCCCTTCTGCCCATCACCCACCGGCTTGGTCGGCGAAGGCGG
CACAAAGGCAGGCGGCCTCCTCGGTCACCCACTGCTCCAGCGACTTCTTG
CCCAGGCCCAAGTTGCGCAAGGTGGACACGGAGAAGCGCCTCTGCTCGCG
CCACGCGGGCCCATAGCGCGACAGGATCACCCCTGGGGGCGGGACGGGCA
CGTGG
CYP1A2_RS762551

(SEQ ID NO:117)

TCAAGCACCTGCCTCTACAGGTACCTTTCTTGGGACCAATTTACAATCTC
TGGGATCCCCAACTATAGAACCTGGAAGCTAGTGGGGACAGAAAGACGGG
GAGCCTGGGCTAGGTGTAGGGGTCCTGAGTTCCGGGCTTTGCTACCCAGC
TCTTGACTTCTGTTTCCCGATTTTAAATGAGCAGTTTGGACTAAGCCATT
TTTAAGGAGAGCGATGGGGAGGGCTTCCCCCTTAGCACAAGGGCAGCCCT
GGCCCTGGCTGAAGCCCAACCCCAACCTCCAAGACTGTGAGAGGATGGGG
ACTCATCCCTGGAGGAGGTGCCCCTCCTGGTATTGATAAAGAATGCCCTG
GGGAGGGGGCATCACAGGCTATTTGAACCAGCCCTGGGACCTTGGCCACC
TCAGTGTCACTGGGTAGGGGGAACTCCTGGTCCCTTGGGTATATGGAAGG
TATCAGCAGAAAGCCAGCACTGGCAGGGACTCTTTGGTACAATACCCAGC
ATGCATGCTGTGCCAGGGGCTGACAAGGGTGCTGTCCTTGGCTTCCCCAT
TTTGGAGTGGTCACTTGCCTCTACTCCAGCCCCAGAAGTGGAAACTGAGA
TGATGTGTGGAGGAGAGAGCCAGCGTTCATGTTGGGAATCTTGAGGCTCC
TTTCCAGCTCTCAGATTCTGTGATGCTCAAAGGGTGAGCTCTGTGGGC
[A/C]CAGGACGCATGGTAGATGGAGCTTAGTCTTTCTGGTATCCAGCTG
GGAGCCAAGCACAGAACACGCATCAGTGTTTATCAAATGACTGAGGAAAT
GAATGAATGAATGTCTCCATCTCAACCCTCAGCCTGGTCCCTCCTTTTTT
CCCTGCAGTTGGTACAGATGGCATTGTCCCAGTCTGTTCCCTTCTCGGCC
ACAGA
PON1E2-5_328_869817

(SEQ ID NO:118)

CTTCCTCTCACATACATACCGATTCCTTTAACTAAATTACAGTTAGRAAG
TTCTACGGGTTGTACCTCTCGGAGAGCATTAAGTCGTGTTCTGTGGGGGA
GAAAGAAATAAAACACACACAAAACTATTCAGAAATTATAATAAGTTGCA
AAGGTAGGCAGTCCACAAAAGTTCTCCTTCACT[A/G]TACTTTGCCTGA
GTTTCAACTCCAGAGTTTTTCCTGCAATTTTTCCAGGCAAGGCCAGGGCA
AGACAAGTGGGGAMCTCTGGGTACAATATTTAGTTTTTATTTAGCAGAGG
TGGATAGGTACACATAAGAGATACATAATATCCTCTCTAGGGCTCTGTGT
ACTT
PON13UTR_eye_886925

(SEQ ID NO:119)

CCTGTGTCACTTTAGGTTCTTCTGTTAGAATGTTCTGGATTCGAAGCACC
TGTGGAAGAAATAACATTGGGTTAATATTTTTGTTAAGTCACTTAAAACA
ACCTTATGCATAATAGGGTCATCCTCCATAAGAAGCCATATAATCTTATA
CAATGAGATAAATCCTATTTTGTTCCAAAATTACACTTAACAC[A/C]CC
YGTTTCTTCATTTGGGAACAGGTGGGTACTGATCTCAAGTGATCTTTAGC
AGAGGTGGAGAGTATCTAGACCTACAGGGATGAGGCAGGAAATGCAAATG
AGCAGCGCATCCTGGATGTGGGACATTAGGGAGCAGTGGGGATTTCAGTA
AATG
CYP7PE1_580

(SEQ ID NO:120)

ATGTGTAAAAAGAACAAATAAACCTGTTTAAGATGGGCATAGCTAATAAA
TACATAAACTATAATCATTTAAAGAAAGATAAGAATGAGTTATTCATCAA
GCTTATAATTTGGTCTTGTTAACTTTTAAAGAAGAATTAATTTAGGTGCT
TTGCCAGAGAGACGGTGATCAAGTTCAGAGGAAAGAGAACTGGGAAAAAC
[A/G]TTTCTGCTGCTTCATGTTTCAGTGCTTTTATAAAATCATAGATAT
TTTACTACATATAGTAACATGTTACTCACCTAACATCCTCAAGAGAGTAT
TCTACATAAGTGCATCCTCTAGATAAATATAACTTATTGGAAGCATCAAA
ATTTTATCTATCATTCTTGTGACTAAATGTTTATCAATGTTTCTAA
GSTP1E2E4-5_419

(SEQ ID NO:121)

CCGGGCAAGGGGAGGGGGTGCTGGGCCTTAGGGGGCTGTGACTAGGATCG
GGGGACGCCCAAGCTCAGTGCCCCTCCCTGAGCCATGCCTCCCCCAACAG
CTATACGGGCAGCTCCCCAAGTTCCAGGACGGAGACCTCACCCTGTACCA
GTCCAATACCATCCTGCGTCACCTGGGCCGCACCCTTGGTGAGTCTTGAA
[A/C]CTCCAAGTCCAGGGCAGGCATGGGCAAGCCTCTGCCCCCGGAGCC
CTTTTGTTTAATCAGCTGCCCCGCAGCCCTCTGGAGTGNNNNNNNNNNNN
NNNNNNNNNNNNNNNNNNNNNNNNNNNNNNNNNNAGCCTGGGTGCCTGCA
ATCCTTGCCCTGTGCCAGGCTGCCTCCCAGGTGTCAGGTGAGCTCTGAGC
ACCTG
CYP2D6_RS2267446

(SEQ ID NO:122)

TGTGCGGGAGGACGGGGACAGCATTCAGCACCTACACCAGACAGAACGGG
GTCTCAATCC[C/T]TCCTGTGCTCTGCGTTCATCTGGACCAGTCTCAGG
CCCCAGCCATCTCCAGGAAGACCCA
CYP2E1RS2480259

(SEQ ID NO:123)

TAACAATGGTATTGATGAGACACTGAGGGAGTTTCAGAGACACGACACTG
TTAACAGTGAGACTAGGGGAAGCGGGGAGGAGGAGGCTGTGGGCAAACGG
CCATCACAAGGCAGGACTCACCCTTCTCTGCCTATTAAAAGAAGCACAAA
ATGTACTTGAGTGGAAGGATACCAGCAACACTGACTAATTCGGGGACCAG
[T/C]CTTCATACAATCTCAATTATCCAGAGCTCAACTGCAAAAACCGGT
GTTAAGTTGGGAAGACCGTGTCTGCCCAGTAAAGAAGGCACCCCCAGTGC
TCATCAGTGATGCCTACAGGAGGGAAATAGTGCCCTGTTAGAAGCTGGGG
CTCCAGCACTGGGTGTGAAAAGTATGGAGTTGGTTGTATGATCTTCCCAC
AACAA
CYP2D6_RS2004511

(SEQ ID NO:124)

GACTCTGTCAACTAGTCCTGCGCCCGAGAAGCTCCACAGTACCCTCTCCG
ACCCCACAGCAGGGCGCAGTCACACCTCTCAGAGGCACCCACACTGCCCC
CTCTCCCTGCAGGCG[C/T]TGGGTCCTCCAACATTCTGGCAGGTCCTGG
TTTGTCTCCCCACTAGACGGGGGCTCTGGATGGACAGGCCAGCCCTGCCT
ATACTCTGGACCCCCCACCCAAGTGGGGACAGTCAGTGTGGTGGCATTGA
GGACTAGGTGGCCAGGGTTCCTAGAGTGGGCCCACCTGGCAGTAGCCATG
CTGGGGCTATCACCAGGGGCTGGTGCTGAGCTGGGGTGAGGAGGGCGCCA
GGCCTACCTTAGGGATGCGGAAGCCCTGTACTTCGATGTCACGGGATGTC
ATATGGGTCACACCCAGGGGGACGATGTCCCCAAAGCGCTGCACCTCATG
AATCACGGCAGTGGTGTAGGGCATGTGAGCCTGGTCACCCATCTCTGGTC
GCCGCACCTGCCCTATCACGTCGTCGATCTCCTGTTGGACACGGCCTGGA
CAGACATGCGTCCCCACAATGGGTCAGCACCCAGGGGGTCCGGCCCTGAC
ACTCCTTCTTGCCTCCTATGTTG

### EXAMPLE 3

### Polymorphisms Associated with Response to Treatment with an Ace Inhibitor

[0136] A number of alleles of the polymorphic CYP2D6 cytochrome P450 isoenzyme 2D6 gene have previously been reported that affect drug metabolism. Individuals carrying these alleles often display a ‘poor metabolizer phenotype’ (PM) characterized by deficient hydroxylation of several classes of commonly used drugs, environmental toxic chemicals, and endogenous substances. CYP2D6 mutants have been correlated to drug overdosage and therapeutic failure because of poor metabolization of the prodrug to the active metabolite. For further discussion of the poor metabolizer phenotype/genotype, see Thompson et al., JAMA 289:1681-1690 (2003); Mukae et al., J Hum Hypertens. 16:857-63 (2002); Packard et al., Ann Pharmacother. 36:1058-67 (2002); Lee et al., Hypertension. 38:166-70 (2001).

[0137] In this example, the effects of various SNPs, haplotypes and SNP alleles, including the CYP2D6*4 (SEQ ID NO: 148) poor metabolizer allele, were studied as they affect ACE inhibitor responses. The strongest associations were found in the CYP2D6 gene. For markers 179 and 172, the TT and TC or a TC and TC genotype, respectively, were found at a higher frequency in myalgia case samples than normal controls (i.e., patients who took atorvastatin and were not removed from therapy due to myalgia) (Table 14).

| Polymorphism | Marker number |
|---|---|
| CYP2D6_RS1058174 | 179 |
| CYP2D6_RS2267446 | 172 |

TABLE 14
CYP2D6 179-172 RISK GENOTYPE: PATIENTS
WITH TT TC or TC TC GENOTYPE PAIR

| | WITH | WITHOUT | TOTAL | % WITH |
|---|---|---|---|---|
| DISC CASE | 34 | 16 | 50 | 0.68 |
| DISC CONTROL | 1 | 24 | 25 | 0.04 |

P < 0.0001

[0138] This genotype association was measured to be highly significant using a Fishers Exact test (two tailed) (p<0.0001) (Table 14).

[0139] To assess whether the TT-TC and TC-TC genotypes at 179-172 were linked to CYP2D6 poor metabolizer genotypes, each case and control was typed using a commercially available assay (DrugMEt™ Microarray Test and CYP2D6 Deletion/Duplication PCR Assay, manufactured by Jurilab of Kuopio Finland). CYP2D6 genotypes are determined using this assay as:

[0140] 1—wild type

[0141] 2—mutant, normal function

[0142] 3—variant, poor metabolizer

[0143] 4—variant, poor metabolizer

[0144] 5—variant, poor metabolizer

[0145] 6—variant, poor metabolizer

[0146] 7—variant, poor metabolizer

[0147] 8—variant, poor metabolizer

[0148] 9—variant, poor metabolizer

[0149] 10—variant, poor metabolizer

[0150] 11—variant, poor metabolizer

[0151] 12—variant, poor metabolizer

[0152] 17—variant, poor metabolizer

[0153] As used herein, the term “poor metabolizer” refers to the response of patients with certain CYP2D6 variants to respond aberrantly to particular drugs (e.g. competitors or known substrates). The drugs that may be affected by poor metabolizer genotype and phenotype many that have been reported in the literature. However, the poor metabolizer also encompasses the responses to other drugs that have not yet been characterized as affected by the phenotype.

[0154] Atorvastatin patients were genotyped for the CYP2D6 gene. Thirty five patients were found to possess the CYP2D6*4 poor metabolizer allele, and each of these also possessed the CYP2D6 179-172 TT-TC or TC-TC genotype pair. The linkage between these genotypes was complete; each of the patients possessing the CYP2D6 179-172 TT-TC or TC-TC genotype pair was found to also have the CYP2D6*4 allele and all patients harboring the CYP2D6*4 allele also had the CYP2D6 179-172 TT-TC or TC-TC genotype pair.

[0155] Table 15, below, shows the data of Table A expressed in terms of CYP2D6*4 genotypes.

TABLE 15
CYP2D6 179-172 RISK GENOTYPE: PATIENTS
WITH CYP2D6*4 Poor Metabolizer ALLELE

| | WITH | WITHOUT | TOTAL | % WITH |
|---|---|---|---|---|
| DISC CASE | 34 | 16 | 50 | 0.68 |
| DISC CONTROL | 1 | 24 | 25 | 0.04 |

P < 0.0001

[0156] The frequency of the *4 allele in the Caucasian population has been reported to be about 15% (Stamer, et al. Clin Chem 48:1412-7 (2002); Menoyo, et al., Cell Biochem Funct. Aug. 30m 2005, Epub ahead of print), and this frequency is more similar to the 4% frequency observed in the Discovery Controls (normal atorvastatin response in terms of no myalgia) than for the Discovery Case samples (68%).

[0157] These results indicated that the CYP2D6 SNP associations described above for the Discovery set, were part of a CYP2D6 haplotype known to be of functional relevance for drug metabolism. This finding lends provides further support that the claimed SNPs are involved in muscle adverse reactions and provides additional validation because generic poor metabolizer alleles of the CYP2D6 gene have previously been documented by others. Furthermore, if the identified SNP were not spurious, it could be expected that the alleles for the SNPs were linked with one or more poor metabolizer variants.

[0158] More specifically, these studies showed an association between myalgia and one particular CYP2D6 poor metabolizer allele, the CYP2D6*4) rather than a more generalized “poor metabolizer” status. For example, no associations were found between myalgia response and CYP2D6 poor metabolizer alleles other than the CYP2D6*4 allele.

[0159] A. Blind Validation

[0160] Showing that the variant CYP2D6 179-172 alleles associated with atorvastatin-induced myalgia are linked to the well-known CYP2D6*4 poor metabolizer allele constitutes one form of validation for these SNPs. Further validation can be shown by demonstrating that the associations extend to an independent sample set.

[0161] For these studies, a set of 64 atorvastatin patients (“Blind Cases and Controls”) were tested: 15 of the patients had been withdrawn from the drug due to myalgia (“Blind Cases”) while 49 had not been removed from the drug due to myalgia (“Blind Controls”, normal response). The Jurilab DrugMEt™ assay was used to genotype patients. As summarized below in Table 16, the association between CYP2D6*4 (equivalent to the CYP2D6 179-172 TT-TC or TC-TC genotype pair) and myalgia response was confirmed in the new blind trial patients.

TABLE 16
CYP2D6 GENOTYPE: PATIENTS WITH CYP2D6*4 allele

| | WITH | WITHOUT | TOTAL | % WITH |
|---|---|---|---|---|
| BLIND CASE | 9 | 7 | 15 | 0.6 |
| BLIND CONTROL | 12 | 37 | 49 | 0.24 |

P = 0.0300

[0162] The frequency of the risk CYP2D6*4 allele in the Blind Case set (60%; Table C) was similar to that originally observed in the Discovery Case set (68%, Table B). This result demonstrates that the association between the CYP2D6 marker 179-172 alleles, which are part of the well-known CYP2D6*4 haplotype, are indeed associated with atorvastatin induced myalgia. The combined results of the Discovery and Blind Case/Control samples are given below in Table D:

TABLE 17
CYP2D6 *4 ALLELE PRESENCE IN ATORVASTATIN (LIPITOR) PATIENTS WHO
WERE REMOVED FROM THERAPY DUE TO MYALGIA (CASE) VERSUS THOSE
WHO WERE NOT (CONTROL)

| SAMPLE SET | STATUS | WITH | WITHOUT | TOTAL | FREQ. | P VALUE |
|---|---|---|---|---|---|---|
| DISCOVERY | CASE | 24 | 27 | 51 | 0.47059 | |
| DISCOVERY | CONTROL | 11 | 44 | 55 | 0.2 | P = 0.0039 |
| BLIND | CASE | 10 | 8 | 18 | 0.55556 | |
| BLIND | CONTROL | 2 | 15 | 17 | 0.11765 | P = 0.0116 |
| TOTAL | CASE | 34 | 35 | 69 | 0.49275 | |
| TOTAL | CONTROL | 13 | 59 | 72 | 0.18056 | P = 0.0001 |

[0163] As shown in Table 17, the observed frequency of the CYP2D6*4 allele in the Combined (Total) Control sample is 18%, about the same in the general Caucasian population of about 15%-18% (depending on the ethnicity). However, the frequency in the Combined (Total) Case sample is much higher (˜50%). Given the sample size involved, this result is highly significant (Fishers Exact Test, two-tailed p<0.0001).

[0164] Overall, and in summary, these results clearly show:
[0165] 1. The claimed CYP2D6 marker 179-172 alleles are linked completely with and therefore part of the well-known CYP2D6*4 haplotype.
[0166] 2. That the claimed CYP2D6 marker 179-172 alleles equivalent to the well-known CYP2D6*4 haplotype were highly associated with atorvastatin-induced myalgia in a first set of 75 samples.
[0167] 3. That the claimed CYP2D6 marker 179-172 alleles equivalent to the well-known CYP2D6*4 haplotype were also highly associated with atorvastatin induced myalgia in a second set of 64 validation samples.
[0168] 4. Therefore, the claimed CYP2D6 marker 179-172 alleles equivalent to the well-known CYP2D6*4 haplotype constitute a validated risk factor for atorvastatin induced myalgia.

[0169] B. Other SNPs Associated with the Risk CYP2D6 Alleles

[0170] Additional SNPs were also determined in the atorvastatin patients. The genotypes of another SNP were found to be in Linkage Disequilibrium with the CYP2D6 179-172 TT-TC or TC-TC genotype pair, which as we have shown is linked with the CYP2D6*4 Poor Metabolizer allele.

| Polymorphism | Marker number |
|---|---|
| CYP2D6_RS2267444 | 93 |

[0171] In particular, the “C” genotype was present for 28 of the discovery samples, and 23 of these also had the 179-172 TC-TC or TT-TC genotype pair.

[0172] 1. Other CYP2D6 Alleles Associated with Atorvastatin Response

[0173] Using the Jurilab DragMEt™ assay to genotype the samples we also noted that the CYP2D6*10 allele was associated with response, but unlike the *4 allele this allele was associated with normal (non-myalgia) response (Table 185:

TABLE 18

| | No. CASE | No. CONTROL |
|---|---|---|
| Sample Set | with CYP2D6*10 | with CYP2D6*10 |
| Discovery Samples | 1 | 6 |
| BLIND Test Samples | 0 | 2 |

[0174] As shown in Table 18, of the 7 samples from the Discovery set that had the *10 allele, 6 of were from normal responders. Two of the Blind test samples had the *10 allele, and both of these patients were normal responders. In total, 8/9 individuals who had the 10 allele were normal responders. The *10 allele was found to be present in each patient that had the CYP2D6 179-172 CC-TC genotype pair—each of the patients with the CYP2D6 179-172 CC-TC genotype pair was found to be either heterozygous or homozygous for the CYP2D6*10 allele. Thus, the CYP2D6 179-172 CC-TC genotype pair is a marker for the CYP2D6*10 allele, which is associated with normal (non-myalgia) response to atorvastatin.

[0175] C. CYP2C8 Haplotypes Associated with Risk of Atorvastatin Induced Myalgia

[0176] The atorvastatin studies also found that the following alleles of the CYP2C8 gene are associated with atorvastatin-induced myalgia, though to a lesser extent than the CYP2D6 179-172 TT-TC or TC-TC genotype pair/CYP2D6*4 allele:

| Marker | SNP Name |
|---|---|
| 391 | CYP2C8_RS1934952 |
| 374 | CYP2C8_RS1934953 |
| 369 | CYP2C8_RS1891071 |
| 225 | CYP2C8_RS1891073 |
| 362 | CYP2C8_2071426 |
| 249 | CYP2C8_RS1891072 |
| 2760 | CYP2C8_2185571 |
| 282 | CYP2C8E8_296 (rs1934951) |
| 54 | CYP2C8E7-5_349 (RS2275620) |
| 134 | CYP2C8E2E3_397 (RS2275622) |

[0177] The phase-known sequence of alleles for these SNPs, along the chromosome in order shown above, constitute haplotypes. Three of these haplotypes were associated with the myalgia adverse event—that is, the haplotype alleles were present at a higher frequency in individuals who had been withdrawn from atorvastatin due to myalgia (CASE) compared to normal patients that had not (CONTROL).

| | | |
|---|---|---|
| SEQ ID NO'S 149-152 | CASE | CONTROL |

| | | |
|---|---|---|
| Haplotype 1: AAATGTTGAC | 34 | 11 |
| Haplotype 2: AAGTATCGTC | 3 | 0 |
| Haplotype 5: GAATATCGAC | 16 | 6 |
| Haplotype 6: GAATATCAAC | 19 | 17 |

[0178] Diploid pairs of these haplotypes were distributed as follows:

| Genotype | CASE | CONTROL |
|---|---|---|
| 1, 1 | 8 | 1 |
| 1, 5 | 6 | 2 |
| 6, 6 | 1 | 6 |

[0179] In addition, Native American and East Asian admixture was associated with myalgia and normal response:

| Ancestry | CASE | CONTROL |
|---|---|---|
| European, with >11% Native American admixture | 4 | 0 |
| European, with >11% East Asian admixture | 1 | 5 |

[0180] D. Classification Accuracy within Discovery Set

[0181] The results described above demonstrate that alleles of two separate Cytochrome P450 genes are associated with atorvastatin-induced myalgia response. The following conclusion can be drawn from the data presented above:
[0182] 1) The CYP2D6 gene, where the CYP2D6*4 allele marked by the CYP2D6 179-172 TT-TC or TC-TC genotype pair, or directly with a CYP2D6*4 genotyping assay, is indicative of likelihood to express atorvastatin induced myalgia
[0183] 2) The CYP2D6*10 allele marked by the 179-172 CC-TC genotype pair, or directly with a CYP2D6*10 genotyping assay, is indicative of likelihood to express normal (non-myalgia) response to atorvastatin.
[0184] 3) Certain CYP2C8 haplotypes as discussed above, are indicative for myalgia or normal response to atorvastatin.
[0185] 4) Native American and East Asian admixture as discussed above indicative for myalgia or normal response to atorvastatin.

[0186] A simple classification can be used to combine the CYP2D6 and CYP2C8 risk alleles into a scheme, where possession of a “risk allele” or “factor” can be used to infer the classification as a myalgia responde, and possession of a “protective allele” or “factor” can be used to infer the classification as a normal responder, and lack of a “risk” or “protective” allele or factor bestows upon the individual an inconclusive classification. This scheme partitions the Discovery set of atorvastatin patients in the following way (Table 19):

TABLE 19

| | classified | | classified |
|---|---|---|---|
| | MYALGIA | incon | NORM |
| actual MYALGIA | 35 | 15 | 1 |
| actual NORM | 1 | 14 | 22 |

[0187] As shown in Table 19, approximately ⅔rds of the patients carried a risk or protective allele and could therefore be classified; of these, 97% were correctly classified using the above classification scheme.

[0188] Although the invention has been described with reference to the above examples, it will be understood that modifications and variations are encompassed within the spirit and scope of the invention. Accordingly, the invention is limited only by the following claims.

What is claimed is:

1. A method for inferring a muscle adverse effect statin response of a human subject from a nucleic acid sample of the subject, comprising identifying in the nucleic acid sample, an occurrence of at least one statin response-related single nucleotide polymorphism (SNP) of a marker, wherein the marker has a sequence selected from the group consisting of:
a. nucleotides 3911-4379 of SEQ ID NO: 134;
b. nucleotides 31264-31822 of SEQ ID NO: 131;
c. nucleotides 22281-23778 of SEQ ID NO: 143;
d. nucleotides 3482-4414 of SEQ ID NO: 134;
e. nucleotides 1895-2286 of SEQ ID NO: 132;
f. nucleotides 650-1166 of SEQ ID NO:131;
g. nucleotides 771-1171 of SEQ ID NO:142;
h. nucleotides 79999-80360 of SEQ ID NO: 133;
i. nucleotides 31264-31822 of SEQ ID NO: 131;
j. nucleotides 2440-2560 of SEQ ID NO: 134;
k. nucleotides 23757-24069 of SEQ ID NO: 131;
l. nucleotides 30438-30711 of SEQ ID NO: 131;
m. nucleotides 23571-24967 of SEQ ID NO: 131;
n. nucleotides 12971-14510 of SEQ ID NO: 143;
o. nucleotides 26896-27098 of SEQ ID NO: 130;
p. nucleotides 8115-8737 of SEQ ID NO: 143;
q. nucleotides 13465-13865 of SEQ ID NO:138;
r. nucleotides 26056-26456 of SEQ ID NO: 138;
s. nucleotides 26167-26197 of SEQ ID NO:138;
t. nucleotides 17636-18035 of SEQ ID NO: 138;
u. nucleotides 25354-25754 of SEQ ID NO: 138;
v. nucleotides 12153-12553 of SEQ ID NO:138;
w. nucleotides 7082-7942 of SEQ ID NO: 139;
x. nucleotides 5779-5827 of SEQ ID NO:135;
y. nucleotides 5851-6442 of SEQ ID NO:135;
z. nucleotides 7909-8504 of SEQ ID NO:139;
aa. nucleotides 651-1166 of SEQ ID NO:131;
ab. nucleotides 4351-4750 of SEQ ID NO: 139;
ac. nucleotides 3138-3500 of SEQ ID NO:139;
ad. nucleotides 3482-4414 of SEQ ID NO:131;
ae. nucleotides 4397-4797 of SEQ ID NO:139;
af. nucleotides 31264-31813 of SEQ ID NO:131;
ag. nucleotides 16240-16589 of SEQ ID NO:145;
ah. nucleotides 25192-2298 of SEQ ID NO:145;
ai. nucleotides 11344-12528 of SEQ ID NO: 139;
aj. nucleotides 2800-3685 of SEQ ID NO:129;
ak. nucleotides 30350-30631 of SEQ ID NO: 131;
al. nucleotides 750-1110 of SEQ ID NO:134;
am. nucleotides 5880-6229 of SEQ ID NO:145;
an. nucleotides 25192-25479 of SEQ ID NO: 145;
ao. nucleotides 17794-18106 of SEQ ID NO:130;
ap. nucleotides 26895-27098 of SEQ ID NO:130;
aq. nucleotides 26895-25478 of SEQ ID NO: 130;
ar. nucleotides 34-825 of SEQ ID NO:127;
as. nucleotides 11012-11412 of SEQ ID NO: 135;
at. nucleotides 3178-3786 of SEQ ID NO:134;
au. nucleotides 143-518 of SEQ ID NO:140;
av. nucleotides 17795-18116 of SEQ ID NO: 130;
aw. nucleotides 3388-3786 of SEQ ID NO:134;
ax. nucleotides 502-902 of SEQ ID NO:126;
ay. nucleotides 23737-24368 of SEQ ID NO:131;
az. nucleotides 1805-2204 of SEQ ID NO:131;
ba. nucleotides 5841-6441 of SEQ ID NO: 135;
bb. nucleotides 26613-27098 of SEQ ID NO:130;
bc. nucleotides 19968-20369 of SEQ ID NO: 138;
bd. nucleotides 19636-21357 of SEQ ID NO:136;
be. nucleotides 5881-6229 of SEQ ID NO:142; and
bf. nucleotides 2440-2560 of SEQ ID NO:134;
or the complement of any of a-bf above;
wherein the SNP is associated with a muscle adverse effect in response to administration of the statin, thereby inferring the muscle adverse effect statin response of the subject.

2. The method of claim 1, wherein the SNP is located at:
a. nucleotide 4332 of SEQ ID NO: 134;
b. nucleotides 31683 of SEQ ID NO: 131;
c. nucleotides 23077 of SEQ ID NO: 143;
d. nucleotides 4208 of SEQ ID NO: 134;
e. nucleotides of SEQ ID NO: 132;
f. nucleotides 860 of SEQ ID NO:131;
g. nucleotides 971 of SEQ ID NO:142;
h. nucleotides 2098 of SEQ ID NO: 133;
i. nucleotides 80160 SEQ ID NO: 131;
j. nucleotides 2500 of SEQ ID NO: 134;
k. nucleotides 23809 of SEQ ID NO: 131;
l. nucleotides 30635 of SEQ ID NO: 131;
m. nucleotides 24272 of SEQ ID NO: 131;
n. nucleotides 13780 of SEQ ID NO: 143;
o. nucleotides 296935 of SEQ ID NO: 130;
p. nucleotides 8462 of SEQ ID NO: 143;
q. nucleotide 13665 of SEQ ID NO: 138;
r. nucleotide 26256 of SEQ ID NO: 138;
s. nucleotide 26137 of SEQ ID NO:138;
t. nucleotide 17836 of SEQ ID NO:138;
u. nucleotide 25554 of SEQ ID NO: 138;
v. nucleotide 12353 of SEQ ID NO:138;
w. nucleotide 7444 of SEQ ID NO:139;
x. nucleotide 5832 of SEQ ID NO:135;
y. nucleotide 6063 of SEQ ID NO:135;
z. nucleotide 8004 of SEQ ID NO:139;
aa. nucleotide 860 of SEQ ID NO:131;
ab. nucleotide 4550 of SEQ ID NO: 139;
ac. nucleotide 3300 of SEQ ID NO:139;
ad. nucleotide 4208 of SEQ ID NO: 131;
ae. nucleotide 4597 of SEQ ID NO:139;
af. nucleotide 31671 of SEQ ID NO: 131;
ag. nucleotide 16399 of SEQ ID NO:145;
ah. nucleotide 2097 of SEQ ID NO:145;
ai. nucleotide 11987 of SEQ ID NO:139;
aj. nucleotide 3500 of SEQ ID NO:129;
ak. nucleotide 30434 of SEQ ID NO:131;
al. nucleotide 930 of SEQ ID NO:134;
am. nucleotide 6046 of SEQ ID NO: 145;
an. nucleotide 25286 of SEQ ID NO:145;
ao. nucleotide 18060 of SEQ ID NO:130;
ap. nucleotide 26950 of SEQ ID NO:130;
aq. nucleotide 26950 of SEQ ID NO:130;
ar. nucleotide 734 of SEQ ID NO:127;
as. nucleotide 11212 of SEQ ID NO:135;
at. nucleotide 3671 of SEQ ID NO: 134;
au. nucleotide 326 of SEQ ID NO: 140;
av. nucleotide 18060 of SEQ ID NO: 130;
aw. nucleotide 3671 of SEQ ID NO:134;
ax. nucleotide 702 of SEQ ID NO:126;
ay. nucleotide 24205 of SEQ ID NO:131;
az. nucleotide 2005 of SEQ ID NO:131;
ba. nucleotide 6063 of SEQ ID NO:135;
bb. nucleotide 26806 of SEQ ID NO:130;
bc. nucleotide 20169 of SEQ ID NO:138;
bd. nucleotide 20343 of SEQ ID NO:136;
be. nucleotide 6183 of SEQ ID NO:142; or
bf. nucleotide 2500 of SEQ ID NO:134.

3. The method of claim 1, comprising identifying a nucleotide occurrence of each of at least two statin response-related SNPs.

4. The method of claim 1, wherein identifying a nucleotide occurrence of at least one statin response-related SNP comprises
a) incubating the nucleic acid sample with a probe or primer that selectively hybridizes to or near a nucleic acid molecule comprising the nucleotide occurrence of the SNP, and
b) detecting selective hybridization of the primer or probe, thereby identifying the nucleotide occurrence.

5. The method of claim 4, wherein detecting selective hybridization of the primer comprises performing a primer extension reaction, and detecting a primer extension reaction product comprising the primer.

6. The method of claim 5, wherein the primer extension reaction comprises a polymerase chain reaction.

7. The method of claim 1, comprising identifying a nucleotide occurrence of each of at least two statin response-related SNPs.

8. The method of claim 1, wherein the statin is Lipitor®.

9. The method of claim 1, wherein the statin is Zocor®.

10. A method for inferring a muscle adverse effect statin response of a human subject from a nucleic acid sample of the subject, the method comprising identifying in the nucleic acid sample, an occurrence of at least one statin response-related single nucleotide polymorphism (SNP) of a marker as set forth in Table 2 and 5, wherein the SNP is associated with a muscle adverse effect in response to administration of the statin, thereby inferring the muscle adverse effect statin response of the subject.

11. The method of claim 10, wherein the marker has a nucleotide sequence selected from the group consisting of: SEQ ID NOs 1-27 and 46-73.

12. A method for inferring a dry cough adverse effect angiotensin converting enzyme (ACE) inhibitor response of a human subject from a nucleic acid sample of the subject, the method comprising identifying, in the nucleic acid sample, a nucleotide occurrence of at least one ACE inhibitor response-related single nucleotide polymorphism (SNP) of a marker as set forth in any of Tables 1, 2, 4, 5, wherein the nucleotide occurrence is associated with a dry cough effect in response to administration of the ACE inhibitor, thereby inferring the dry cough adverse effect ACE inhibitor response of the subject.

13. The method of claim 12, wherein identifying a nucleotide occurrence of at least one ACE inhibitor response-related SNP comprises
a) incubating the nucleic acid sample with a probe or primer that selectively hybridizes to or near a nucleic acid molecule comprising the nucleotide occurrence of the SNP, and
b) detecting selective hybridization of the primer or probe, thereby identifying the nucleotide occurrence.

14. The method of claim 13, wherein detecting selective hybridization of the primer comprises performing a primer extension reaction, and detecting a primer extension reaction product comprising the primer.

15. The method of claim 14, wherein the primer extension reaction comprises a polymerase chain reaction.

16. The method of claim 12, comprising identifying a nucleotide occurrence of each of at least two ACE inhibitor response-related SNPs.

17. The method of claim 12, wherein the ACE is enalapril.

18. The method of claim 9, wherein the ACE inhibitor is lisinopril.

19. A method for inferring a poor metabolizer phenotype of a human subject from a nucleic acid sample of the subject, comprising identifying in the nucleic acid sample, an occurrence of at least one single nucleotide polymorphism (SNP) of a CYP2D6 marker, wherein the SNP is associated with the poor metabolizer phenotype, thereby inferring the poor metabolizer phenotype of the subject.

20. The method of claim 19, wherein the CYP2D6 marker comprises at least about 100 nucleotides of SEQ ID NO: 134, 147 or 148.

21. The method of claim 19, wherein the marker is nucleotides 3911-4379 of SEQ ID NO: 134.

22. The method of claim 21, wherein the SNP is located at nucleotide 4332 of SEQ ID NO: 134.

23. The method of claim 19, wherein the marker is nucleotides 2440-2560 of SEQ ID NO: 134.

24. The method of claim 23, wherein the SNP is located at nucleotide 2500 of SEQ ID NO:134.

25. The method of claim 19, wherein the marker is CYP2D6_RS1058174.

26. The method of claim 19, wherein the marker is CYP2D6_RS2267446.

27. The method of claim 19, comprising identifying a SNP at nucleotide 4332 of SEQ ID NO: 134 and a SNP at nucleotide 2500 of SEQ ID NO: 134.

28. The method of claim 27, comprising identifying the genotype of the SNPs at nucleotide 4332 of SEQ ID NO:134 and nucleotide 2500 of SEQ ID NO:134, wherein a TT and TC genotype or a TC and TC genotype, respectively, is associated with a poor metabolizer phenotype.

29. The method of claim 19, wherein a poor metabolizer phenotype is associated with myalgia in atorvastatin-treated patients, thereby inferring myalgia response to atorvostatin.

30. The method of claim 19, wherein the poor metabolizer phenotype is associated with the CYP2D6*4 allele.

The application's sequence listing, which the Patent Office published only in electronic form, follows.

SEQUENCE LISTING (152 sequences)

SEQ ID NO: 1 - DNA, 332 bp, Homo sapiens
ccatgaatgaacaccactgtcaggtccaacaaatgcaaataaagtaggagcactgaaatttgctaacaagaagagatgatgaacacagatggacccaaagtggtggaacaaatttacataagtcaatctataatgtgtaagacacatataaacaaagatgaattatttctttctacaataatytgaactgtaagtggcttctagaactagattctcaactcagctatatcaaatattaaattactaagggaacctttagaacacccagatattttaagtctcatacagatgagcactgtttacttaatttatatttaaaaatccaataaatg

SEQ ID NO: 2 - DNA, 425 bp, Homo sapiens
gaattcagtctccattaccacctcttcagttggagctcttactcttacctggaaaaatgcaatctctacgtttctggtcacttacaagtcacattccctccacgcatttcagccacattaactttctagatccacaaccccaatttaccctctcccagaaacttgcaatgtaatgcaaaattaatgtctgtgctatcgcctgcatctattctctaaatataacatcarttgactttccactgtattctcaattttcctctttctattgaaagataatctcaacctctctctaatgggcaagttgaacctgcctttaaggccaatctccaatgccgtatttttcaataaaacttcctgggtccttctagctgatcataatctctcacagtttaaatttagcatcacctatattcctcatggaattc

SEQ ID NO: 3 - DNA, 756 bp, Homo sapiens
ctgcgcctggccaggaaactttgctttaataatgtattggctcagattgcaagtcattaatttatttgttcaacaaatgactgttttactactgccttgtaagtgccagacaaatgttaggcatgtgtaggtttggggacaagggggatagattagggatgaaataatgatctagaagacatccgatgtgccatgaaggacccaacatttaacaggccacaagaggaaagagacagacatgtaataaatgattttacttcaactcattaagtgtttcaataaaagtagacataaagtcctgaggtggcaattactagggattggccaactgtggctcaaggaaccaggaagtgccttatggaggagcctaataattatgatggttctgctgtcctttgtactattgtttaagattcatgcccaatctaatacctgatgacstaatctttttattgcttgtggttctccttgaggaagatgatgaagagaggtgaaaactgcttcagccaccctccccccgaggactgctgccctgccttattttccttaagtttctgtaccatgcctctgacagaagagaaagtttatccctggggaggcaagtggagatgaggcctagcattccatatggagatcctggatccccttccttttgcccaatatagacctggggaagagttcaaggaagtggagaaaacagtacgtttccaaaggcagagctccttcatctgggaaactccctccaggggctggcta

SEQ ID NO: 4 - DNA, 513 bp, Homo sapiens
  misc_feature (329)..(351): n is a, c, g, or t
ggtaagtgagtgcataatgattctgctcctgcccatctcattctctgcattttcaaagcagggtaagtatgcacacagttcagaattacctccataattacacataaataagtagcccagtaattaaaacatgaactgcaaaataccagggtaatcattatctttggtgatggaaagagaaaataagattgtacgtggagacttcagctctctgtaatgatttgttgttgtttttctaagagctgaaatgatagcatttgttaaatttagatgacgagtacacaggtgttgatgtattccatactttcctcaatatttgaactatttcnnnnnnnnnnnnnnnnnnnnnnngacatgcagtgtctctccattctctcgtcagcacacaggaatctggcgccctcacaagttcacacaacagaaaaacagcaggaasaaaatgactttcaaccaagaccaaaggacaaagtgaggggcggcaagatcccagcaggaagggcaacagggtctaga

SEQ ID NO: 5 - DNA, 631 bp, Homo sapiens
  misc_feature (345)..(387): n is a, c, g, or t
ctttttgaatggcaggtgctcttgcctgattaacatttattatagtcagtaactgcaggaaagactgtacacataacacacggagttataggatgttggtgatgttggtgttggaatgcacctgtgtaggatggtaactgtcttttgcatcatggtaggagatttggagacggagtcttacctagttcaagcctgtggtcccaccaactattaaaccagtttagtagcttgacatcttagtctatttcctcacctatgaaattcctacctcatggggtgattatagggagcaattaagaagaaggcgtgaaaatattttatgaactataaagcaggaataccggnnnnnnnnnnnnnnnnnnnnnnnnnnnnnnnnnnnnnnnnnnncctgaggctgagagatttgaagcttsttttgttcagagttttctaaatcctagtttgatctcttttgctaaatcacacactcttggacaacagggactcattttattctcacatccctcacagcagctaacgtgaaaatgttgttctttattagagacagctcctatctcatggatgcactacaattactttccatgactggccctaggttaagagagaattccaggccaaagacctatctaga

SEQ ID NO: 6 - DNA, 379 bp, Homo sapiens
  misc_feature (19)..(19): n is a, c, g, or t
ataatgctagacggaaganaatgtagaggattttgtggtggatctgatggtgagtggttagagaagtattaaggatgacttgaattttacccagaataattgtttataccattctttaaaatcatgagttttgttttgggcatattaatttgcagataaacacaaatccatcagcaagatttaacataaatcatatttgtagagggagagtcagtgagaagcaatgagggcttgtgtctgagctrtgagaaatcccggtcttttaatggtctagatagtcagatggcctgaaaatgaggcaaaacaggaatagctagagttgagaaagaacatccaggacactattagaagcccagttagaagatgagggaagagagtg

SEQ ID NO: 7 - DNA, 315 bp, Homo sapiens
gagtgggacacatttgccttctttcttcccaaagcacaagccagcacaggccccatcatctccagaatcaagtccaagttgcctttgtttgattttcagagtctcttggcctagtatcagtctgcttcttagctttacctgtcagtgctacactctcctcctatactcacccaccccacccaacctttgttctggtcacacccaagcggttcaaggccccctagctggcccttcttcatcttcgctgaaatggcattccaggytagctctgttacagcagtcattgtgtactgggaagtggcaggatacaagatg

SEQ ID NO: 8 - DNA, 470 bp, Homo sapiens
gagggtcttcctacccaggtggagtctgtctttgagcctgttaactcactatcccagtttataagcagcccttttttatggtaggccccacgtggttgggtaacctaactgatgtgataatgaggacagactaaaggtcacgagattgttaacaygtgtgaggagattgtaggcttagcctatcaggtgagggaaaggttagcgtaccaactgtctccacacttcaaagcatgtagctagtttgctgcactaacttaattatctgtgctattgatatctttgaggaacatatctataccctggatacagttacttcacagtaggagatagcaggaggtggcttgttcggttgccaacttcctaaaatgctttttagagtcagctgggttgcttagtcctctcttgctcttggattaaatataaaaataactatgtaaagcatatcagccctcttttccctgtctgctgaa

SEQ ID NO: 9 - DNA, 703 bp, Homo sapiens
  misc_feature (85)..(144): n is a, c, g, or t
tacagaactacaatattgcagtcaggtttttttgtgttgtgagatggccacaagtttacaaagcatcatatatatatgaattccnnnnnnnnnnnnnnnnnnnnnnnnnnnnnnnnnnnnnnnnnnnnnnnnnnnnnnnnnnnntctccatatagtcttcccaatctacgttttgagaggccaggcagaaaaaagatgagaaaataaaggatgtgtatttaattagtctctaatccaatgctggacatttgcccagtaacttcccatgcctcctctacccttaatccagcctctctctcttctagaatgacccttatcttctggagacattcgcaccagcatggccctgtgaaatctcaaatgtgccttggtttgggtaaaggaaagcagccttgctaggctgcctaacactttttccaggataaagacagaatcagatgtcccacaaggggccagcccaaaatccatttaagtacctcaataaattctayggcacatcagtctgtgaagctatataaaacatatttaactctgttttatgacctattttactacttttgagagcctttccaaactttagaatcactgttttctccaggaggaaggcgctgattggccccctgcagtcctggaaggccattatggagactggaattggtgtgctaaagtcattatgattatcatgaatcctctatttcaacac

SEQ ID NO: 10 - DNA, 608 bp, Homo sapiens
tgtacttcatgcactgctccatcctcaatgtttagatgtatgaatccaggcactttttctcaaygtatcaataactttgctgaataataagtgtacacagtgggacagggtaggcataaggtactgtgggaggaaacaaagatgactctcattttctgtcttcaaccagcgtttgatctggtggaagaatttacaatcaagatgatactttctattttacccttgctttatctatcatttctagagcaataaaaataataacaagtatgtttttaaaaggagtctatttagagctctagtacacatcaggttgcagttttccatctgtcaactgcagaaacaaatcctctaaaatatagtgaaataaagaaatgtgatggataaaagaagtggaaaacattggcgaaaacagtacttttttgtcacaaaatgtcagtgatcacaaactcagaggaaattaatggagaaggtctacgttattttttcttaaaaaattgaagtcagaataagccacacattgcttacaaggaatttcaaagtaaaaagtaggcctggcagccagagtttgcccactgctccaagtgctattacagtttactcttccctat

SEQ ID NO: 11 - DNA, 526 bp, Homo sapiens
taagtaagtaaagcctgaaactcttaaaaaattatctttggctatttagattatacttttctgaaaaggactctgtggtaatgaatcatgtggtttcaagattcacatgcgttaaaattacttcaggacactagtcatttttcaattaccagtagaagtaaatctcaaaggaagagttctgcagattcttgagccatcaatggcctgtaggaaatcttttgaacaactgggtacatgttggagaaagtagggtcttgttaaaacattttaaaaataactaaactaagccaaaaatccattttggatccatggggtagactgtctcatagaatgtttctaaaaggaggtttttaaagtgttgttggatggtccctcttttgagttgytggaacataaatcatttgagacatttgatttgatggtttataaagtttccatgactctgtggtttattattcccaatttaggcacagggagttggtttatatttatctaatccaggtaatagagtatttaatttcctgtc

SEQ ID NO: 12 - DNA, 506 bp, Homo sapiens
  misc_feature (39)..(39): n is a, c, g, or t
  misc_feature (61)..(105): n is a, c, g, or t
  misc_feature (338)..(359): n is a, c, g, or t
tttgtttctgcatgcaatccagccgacagcaacttttcntgagctatctccatttcctccnnnnnnnnnnnnnnnnnnnnnnnnnnnnnnnnnnnnnnnnnnnnnacaaaatttatgagcacctgctgtatgttggcattgcacatacrcattggatataacatttaaactactcttttgatccttttaattgaaaatgtgatgaaataattatttaaaagaatttttaaagactccactttccactatttttaatgactattttttatcttacctttcagattttacccatgtgcatattttaaaatactgaattcaaatgacaaaacccttcatgnnnnnnnnnnnnnnnnnnnnnngatacttattactacctcatattgtaatttatcttttactacatattaagcctttacattccagttttaaactcttgctgctgaagagaatgaaattgatatggatgaaatgtgactagatagaatgaaataaatagatgtgttaag

SEQ ID NO: 13 - DNA, 540 bp, Homo sapiens
ttgcacctgcatcaaaccccattgagagaacagattcaagagaggtgtaaagtgtcaagcctcaggactgcacccagagcatgctaacttcctagaagcaggagtagggagagattcagtaagtaaatctgagaaaaaaaataaaaataggctagagctagggctacccacaggtaatgatgtttaccccaactccaccaattatttaccacccctttcccatatgggcagaggaaaggattggggtggagagagagactgggaatattccttcattattgtgttggcaaagacattgaagttttctcccctttctagaaacaggataaaagactatcaacacctatgtaagaaagacctactgttttcagagtcagtgagtcatscaatgccctataactgccaccctcacccactcagtggaagaaaaaataactaaaacattaagctcttgcctttaatttccactcttcaccactgattaaaaccagccattaaaaacggctggaggagagaaagtctgactctttttttgttgtt

SEQ ID NO: 14 - DNA, 516 bp, Homo sapiens
tttattaccaagatgatagaaaccacggaaagttaacagacagaaaaacagctcatggtacyattgcaatcaaactctgacacattgggtataatgcctaaaattgagaggagaagaaacctcataaagactaaaactcaccttccctccccctttcagcttgaaataatttagcatttcctgctggctttctttgaggggtggcttccaggtataattcctcaaacagggaatatttttaaatgtatccatatcacaacttcaatcactatgttaagtgaagattcagcactctaggccagcaacgatttctagaaatattttggcatttcattcgtagctctcagccaagtcatctcttgtctcatataaaaactttctgatgaacccaccatagataatcacaacgcattgcacctatataacacataatacgtttgaaatgatttttacaaaaactgtctaatttcatctgacctaggttacgaaggatatatgatgattcccattttacag

SEQ ID NO: 15 - DNA, 750 bp, Homo sapiens
  misc_feature (62)..(196): n is a, c, g, or t
ctggaatacaacccagctcactgtactgagtctccagttttcaaaaagttaacgttccgtannnnnnnnnnnnnnnnnnnnnnnnnnnnnnnnnnnnnnnnnnnnnnnnnnnnnnnnnnnnnnnnnnnnnnnnnnnnnnnnnnnnnnnnnnnnnnnnnnnnnnnnnnnnnnnnnnnnnnnnnnnnnnnnnnnnnnntaagaagtggaggaaccaggatttgaacccagttctctgttccccaagcccatgtgatttcattacctgagttgtcggtgtcacgggatcccccaggtgggtgggtggcccagtcattgtgaatcatttcaacatttcttgttcataatgtgttgtatgagcccacccttggctttggcagacttcctgtygatgggccaaacggtgttgcccggctaagaaggtggtgttctggtttacgccacaggttattctcagaacacaaaagtgtgatttcaatcttctgaaaatgacttcgtgtagatgctttattttattctacttggatatgcctgttcgtggggatgactgtgccgacattcctttcaacagcacaactgagatgtttatagagaaagatgagttttctagaagtttaactggcttttgcttttgtactgaactgttatgagttgggacaatttaaacattaactttggtgtcttgaattcacttgtttatgttaagaaaacgtgggggctataccacccaaaaatttattataacagtctgga

SEQ ID NO: 16 - DNA, 249 bp, Homo sapiens
  misc_feature (140)..(225): n is a, c, g, or t
tagatttacaatacatattcatgcctcattctggaaatttccgtcattactmtctttcctcccaaatgtttttgactgctctcacatgttttctcttccaggttgactatagaattatttttgctgattgagtttttctnnnnnnnnnnnnnnnnnnnnnnnnnnnnnnnnnnnnnnnnnnnnnnnnnnnnnnnnnnnnnnnnnnnnnnnnnnnnnnnnnnnnnnatagaggcatacaatcatctatcc

SEQ ID NO: 17 - DNA, 611 bp, Homo sapiens
cactgccgtcttcctcactctgtatgaatggaagagtccatttggtttgacttccaaggggcgaaatagaagtaaagtcttctccttttcttcagccttgaacatctgttatgccctcttgtttggcagaacagtggccatcaaacctccaaaatgttggactggaaggtttctaatgaaccttgggccattttctgtatgttttgcctttccacatacacggcaaacttggctgctgtcatggtaggtgagaagatctatgaagagctttctggaatacatgaccccaaggtaatacttcattttactttagctttcttgattgtccattataattccrtatgttgtatcttctgctgtagtatgctcatgttcttccatctaacacaggaatattctctcagccaagtatagagactagtccaaaagtctgttgcctggtttaactaaatattccattgtttgtttcataaacgaaacaaaaagactgagaagttttggggagtgtcttttctagagtaggtctttctgatagaaatatctattaatgcatcttttccttgtattatttgaccatctgatagatagcacacctatcagggaatggtctt

SEQ ID NO: 18 - DNA, 760 bp, Homo sapiens
gcataaaagcatttatgttctgtacaaaaagatcagactcctaaccagatttagagatgcaaatatttgtacctaaagagaaagactttttcacctaaagtatagtttagggctagtcatccaaccctaaaatgtaggccacacctacttcaagaaacatattcttgattctagagaataaaaaatgtaaccccacctgtctgttctggcaggctctggtctctggaacgctccatgatgcagctaggggaatataagccagttggcatccctgcctgagggtggtgagattaggggaaagatacttgcaccaagcctccaggtctttcctctgcttactgtggttcttcatcacaaggggagacaagtcctacctcattggcatgcctcactttaagcaaagcataaatgagaatataagcatttaaatraagtgcagataggaacattcctttttaccctataaaaaaatgccatctgacctactatgccataagagcatagtaaaaatactttgttttgaatagtttcaactaggcaatttgtgagcatatagcaaaatgactattgagtttcagttgtgcaaatttggaaaatcttacatacattatggaaattagatttctttcctttgacaaatgtattttgtgtactttcaaaacgtgtgacattttaagtgtttgagaaatggcacacttgcacaccttgttaaagactaaaacagcaacatctgtggtcaattctgccctatattagacag

SEQ ID NO: 19 - DNA, 973 bp, Homo sapiens
aggttgtgtttgaccattcagggctttctcttggccttaaaaattctcagtagtagtagtaactctcttccctgacgacttatttggttctatcatttcaaatatgaacatatcaaaaattcaagagaaaagggatgagaaataaatgatttgtcatggcacaaaagaaggtacaaaatgatgatgtccaagacgtagtgacagttcttaatctctgtaacagcagagaggtagtgaagaaataatcatactcaattgcaacaaagggaatttgatgaaataacaaggccatttgcaaagaatgagtagatcaatggtagggccagggatttgaaaaaagattttaaaatgttttgagaaaactcacactcttaatttttagaacttcaatttctttgtttaaaataaaatctatccttcttcttcttccaataacttgatattccatcattacagaatgtatgaaagttttctaatggattcatttttcatgctctagaagaagaaatgatactatacaatcaacttacattgccttatctacttcctctcrgtctcaattttaggcatatggactgaacttggcactagttttctgtctgggctcagctacttactataaaaactgaagtaatgtcctccatgtttgatatatggtaactagtcctgaagtgaccaacataatacaaatggaaagtaactaacattatatgtcctagtgtttccagtgtgatctttctaaacttctattgtgtttcttaacattttttattgctccctttttccttggataaaatatacatgcttaggcatgaaatattagacctatcattttcactagccttatctcatcactcttgttacattttcttaagcagactacagtgtgctatttgtaaatcacagattataacttgatatatattttattgtcaagccatcagatatgtgcatttacttgacatgttactca

SEQ ID NO: 20 - DNA, 650 bp, Homo sapiens
tcttgcctttaggtgtgttttaccaaaggaacaagacagaagatgaatgccaaaactattaatgcagctaccctggacactaagcccccaaagagatggaggattggaggatgtagagcctgggcactgggtccagtgctgacatggaacatgttcattcttagagtttcactgcaaacactccaaggatagagagcgagaaggttatgtggacatgagaggagaagggtggaagaggattgaatggttcagggtagctaaaaaaaatttttacactttatctcgggctgcttctaaaccctccaccagaaagaattaatcctgcaagcacttaaaacaaaactgatgtgaggaagataataaaacctgtccagggtacagacatccagatttgcaatttagggtgggaagactttagagaccttgtctaacagggctaaagagtatccttatggttttaaagtaggtacattgttttttgtaagcatttctagggttatataagacaaatcagagtctgatgtattgaacacaattgratcttattctgccatatttgtttttaattcacgatttttaaatggatttactggtcatatttctcaggtcatggcaagattttttagtcttaaacttatttagctcagtcc

SEQ ID NO: 21 - DNA, 770 bp, Homo sapiens
  misc_feature (513)..(647): n is a, c, g, or t
aatttcttcagaatattctctccttaaaggaaaatagaaaggaactttacttcagagcagaaatcttagattaataggataaattgtgtattagatatagaaagaaaaaatagtcattttgcaaccaaataataaagtgccaccataaaaacctacaacacataataagaataataaaaagaacgagttataaagagaatcttcatcaacattagagtaaatggcatctaagcaaatctgagtttagtatcatagtgttggaaagaaagaacaaaacaattacaaacataacagtatggattgttgttgtatttaaagaagcggcccctgctagtacttctagaatgtagaaagatgaagrttcaggcattacctgcttcccagctggttggatgattatccagcttagcatcaggtagttaagttgtactgaggcaaaatgaaaacatgagaggataatgctagaggatccagctgggccacagacaaagttttcattcctctattcactcnnnnnnnnnnnnnnnnnnnnnnnnnnnnnnnnnnnnnnnnnnnnnnnnnnnnnnnnnnnnnnnnnnnnnnnnnnnnnnnnnnnnnnnnnnnnnnnnnnnnnnnnnnnnnnnnnnnnnnnnnnnnnnnnnnnnnnngttaatgcaaaagaatatcgagggtactctgatagaagtggggggtcagtgctactttgaacttgaatgactttttgaaaaattcccttccaattaagcaaggcagtcttttctatattccta

SEQ ID NO: 22 - DNA, 1226 bp, Homo sapiens
  misc_feature (311)..(387): n is a, c, g, or t
agatgttatttaatttttgtgtttaatttagagggatctcaaggaaaacgaaggtatgtcaggatggagaacagcacaccatcttgggtctttgattgaaaagtcatagcaagggtgagattacctggagtaggaatctgctaaggaggacattctatcaaaggatcagtttacctgaaaaatctccttactgattaaaattcttcttattccctactttctatgtccttctctaagcatcacatctctagatgagtgccatttttcaaattcagtgtgcataagtgtcatctgcagaactcaatataaannnnnnnnnnnnnnnnnnnnnnnnnnnnnnnnnnnnnnnnnnnnnnnnnnnnnnnnnnnnnnnnnnnnnnnnnnnnngctccttctttgcagttccttgccctctatttggaagctcatggtgtttacattataaattcctcttttctggcatctgactttccctgtgatggagaacagggagtctgaataggaaagcacagcctgccatgagtacattttcaggctcsttaagtctcatattcatttgccgcaaggaatgagaaaagaagagagagcaactaaagactgcatgtttcaaacatgggtgatcatcatttctcctggggtaacaggctccccttggagaaagaaattacaaattactaatagatcatatggcagaaaattgcaaattccaagcaaaataaatatattcttccatttctagagttttaaattggctataaggtaggagggtgcagtattaataggcagctatcaaatagaacagtggtgttaaattacataatcaatttaatgttctgggtcagttgacaaagaaatctgttctctcactgccactaatttagagctttcaatatcccattcacaagtctttttaaaaaacttttgggaaagattttggtatatcaaattcttccataaacatctgtaacagctgtgtcagggatcccagactagctgacctttctccttttgcagtctgagggtggaaatgagaacataatcgcccatgatgagctggctgagcaaagttgggccaagccatcaaatgcagctgttgacttcccacaggattgatctctcttgcctcacagttcacttcaggaggaaggtgtgtagaatatgaggccacatgtcctgtgtgagtgtgcatgtgtgtgtgaatacaagcacacatgttcatatccaca

SEQ ID NO: 23 - DNA, 440 bp, Homo sapiens
  misc_feature (13)..(13): n is a, c, g, or t
  misc_feature (17)..(17): n is a, c, g, or t
gggcacacatggnacanaagttatgatcaggggcattacgaaagtgttgtgagagaggtaaaaacaaggtgactcatagaaccgagctgtgcctagccgcacaagcagggatgcactgggcagagagaagaaggagaatgctgcacacagagaaaatggcactgaagaaggcagggaggcatggaaaatcaggaatgctcacaggatggtgaggtcttcaagttgggattaaagtatatatttgttcattctttcactcaaaaccattttgaaggggagagagggactatcatgttctgaacatcataatgaaagcttctgtgaaagcccatgtgacataacccaacacagtccttccttgctggccttacacattttactcrttctttactgagttcttttctaagtacaatgtaatggtaaagagcatggactctaga

SEQ ID NO: 24 - DNA, 503 bp, Homo sapiens
  misc_feature (253)..(253): n is a, c, g, or t
taaatttgtggttccttggttaactaatccaacctttcactgaatctttctatggtaactctgctcatcattttctttctctggtccctcctttctcactatatgctattgccttagtcttcttgatagtccaagaagcccagggttttttgtagctgagagttggaattggttttataaccccttaggattgaagatcatcctctcaaagtattgcacagaatgtaacactttccaaatgtggtgtctagcntgatactgatatgagacawccttaccccctgtaatcaagatattgtatatttcctggcaagtaaatttcaagccttttggctctacagattctctgtttcttggtttagaggaaatttagcaggtgatgtgttatagtatggagtcacttatatgttaaaagctacattgtgacatgggagatttcagtgatgaaaaaccggaagtgggaaatctgcagttggcaacttgattaaggagaactttctaga

SEQ ID NO: 25 - DNA, 933 bp, Homo sapiens
cagggcacccagaacattcacttcacttggcatcagtattttgagggacacccccaccaccgcccacctttgttggttcttgagcaggggaaataggactatgaaataaagggaggcgattctagccaatgcatacaggtcttcctaccactgagatgctcaaaggtctagagcaaggagttggggggggctcccgtggagacagagagggcatagcctcaagactcattgcttggtcgtaaccctagagccttggatacagaccctaagctgtccaaaagggatctcaagcctgcctgtggacaccctggagggacccccaatcctcccatacctatgggccaggcatgacccagggccaggtctgtaaatgtctacacttttcactggaaggagctaaccctgagcacagtggacatccctgtgcaaagatcaggayggaagcaaggctgtccccagccagaacaaacacctgctcccccagcgtccccttgcctattttcccaccctccttctcacgctgttccctggctgctcaggaaagtctggccctgggtaaaagtctccattcacacccttatccctctcccctatctggtcagaatctggggaaccctacaaaaccataatatacttcccacagggatcccctaccctgaaggaaataactccagatctcaagtgtttttctccacccaactggcctgtcttggtgcctggaatttcagcttcctccctgctgtatcagattccctgggaacaaagttctcctggaagtggggtggcctatggctaccgtctgacaccagcctagtggagaaagagggttcaatgagctaaaagggctccccaccacctcctctgagccatcacacacccccacattgtgctagagtctctgccaatacccccagccagcgctcagctggccgc

SEQ ID NO: 26 - DNA, 521 bp, Homo sapiens
ttgtttccatactttcaaaaacactattttgtttaccaattatcaagcatttgttaagtatctatcccaagctaagtactgtgctatattggtcaggtcaggcaacgcagcaccttaaaagttgaagagaagcctttggaaccattattcattcattcaattgaatatggtcaattggcatcatgaatctaacaattaggaattgggtagcaatatgaagggtgtgtatgggaaggatcaggtggcaggagaamagcaagaagacaggattggggtcattttcagtcctgggcaaagaattgagcatgcagacaagatcagtggggtccttcctaggtatttatgaatccctgaatctcaaactgaataccttgtgtagcagaagcgagcgtacacagaccctagcagatacacatgtgaacctgggtagtccctgaagaacaggacagggctcagctgcaggtaccgtgcactatgaccctgccagccacacacatgggcactaacattctgagcagtca

SEQ ID NO: 27 - DNA, 611 bp, Homo sapiens
  misc_feature (149)..(244): n is a, c, g, or t
agtctcccagccttgaactttccatttcaagataacctttcaggccttaatgtagtctgaagagatatgtgttcgtggaatatttagctttcaagaaacaaatagcataggaggaaaaaaagaaacctcaatattggtaattaagaaannnnnnnnnnnnnnnnnnnnnnnnnnnnnnnnnnnnnnnnnnnnnnnnnnnnnnnnnnnnnnnnnnnnnnnnnnnnnnnnnnnnnnnnnnnnnnnngattgaagatgattcttgctgaggcctctcccagctctaataataagtccaaatgaatagtctaggaaacaattaatcattagcatctttataacagcagcactagcctcttgaatatgttgggcyacgtgacaaacatggacagaaaatcttggcaagcccctgccctgtcactcccaaatcagcctctgtcactttactctgtttcagtacaagcaaatgtaatgtgaggaacctagggaaagtcatgagagccttttgaattaactgagtgttacaaccgccattctgttctgaaaataggctgaggctgagttcctcttgacacctcatgcctctcttccctccccagtccttcttggtatcc

SEQ ID NO: 28 - DNA, 1040 bp, Homo sapiens
gtcatcggtgctgaaggatgaggccgtctgggagaagcccttccgcttccaccccgaacacttcctggatgcccagggccactttgtgaagccggaggccttcctgcctttctcagcaggtgcctgtggggagcccggctccctgtccccttccgtggagtcttgcaggggtatcacccaggagccaggctcactgacgcccctcccctccccacaggccgccgtgcatgcctcggggagcccctggcccgcatggagctcttcctcttcttcacctccctgctgcagcacttcagcttctcggtgcccactggacagccccggcccagccaccatggtgtctttgctttcctggtgagcccatccccctatgagctttgtgctgtgccccgctagaatggggtacctagtccccagcctgytccctagccagaggctctaatgtacaataaagcaatgtggtagttccaactcgggtcccctgctcacgccctcgttgggatcatcctcctcagggcaaccccacccctgcctcattcctgcttaccccaccgcctggccgcatttgagacaggggtacgttgaggctgagcagatgtcagttacccttgcccataatcccatgtcccccactgacccaactctgactgcccagattggtgacaaggactacattgtcctggcatgtggggaaggggccagaatgggctgactagaggtgtcagtcagccctggatgtggtggagagggcaggactcagcctggaggcccatatttcaggcctaactcagcccaccccacatcagggacagcagtcctgccagcaccatcacaacagtcacctcccttcatatatgacaccccaaaacggaagacaaatcatggcgtcagggagctatatgccagggctacctacctcccagggctcagtcggcaggtgccagaacgttccctgggaaggccccatggaagcccaggactgagccaccaccctcagcctcgtcacctcaccacaggactggctacctctctgggccctc

SEQ ID NO: 29 - DNA, 559 bp, Homo sapiens
cttgcttttcacacctgtgttttgtgtgctaagtctctggccatggaatctccttcctttattctttgatcttttatgtctgctttatatttggcactgtagataccaacatgacaaggacagagaccttccttcaagaattcacattttaccacaatagataaataaatacagaattacgattcctggtaatctgtgctttaatgaaagcatgagtatgctgttgaggaaaaccagagagcataggatttgattacttgaggggattgtaaagagtgtgaagatgaaatgaaattgaacctatgtcctgaatgtagcctaataaagatgtatcttagccaaaatgaacaacaggatatgaaacttgaaacttcatggtgtgttcaagattgatgaagagagtgtatgaccagagctgaraacagattatgtgaaaagtggaaggaaaagtcatggaatatcaggcttggaacaggaaacaagaatgtgcatgtatttccataatgacagatggaaactcaaaatggcaaaagagctgttttaatgtgggaataaataa

SEQ ID NO: 30 - DNA, 1498 bp, Homo sapiens
aacaaaaggcctctctgaacaaatagcctgcggagataaatacagtgatttgttttcctgatagaactatttagcatgtttaacacattattctgtagtttgggaataagagtgtttcttcccttgaagaaaacaggtccccttctgaagaataatgctgattaccccccaaaatcaaaatagaccagcaccaaatgaagtattaatttacaaacatgaacttagaacttagctcttacttcttgaagttctacatcccagacttaataaattaactacaaaatcaggagtttcatcagctacagtataatttaaaaatccattttcaactggcaggrgtgagggagaaggtcaattgcactgatcaccatgaacttcaagaatttcatcaaaacttttttcccagcttatatttgccttcagaggtgagctgtagattaccatctctgatgctttaacatacaatattcttgttgaaatctcttcaaagagcacagcatgtaaagcactaaactgtgttcagatctgaggagtctgcatggaaagaacctgagacctctctgaaagagccaaaaaccaagtggctgtctcagtgatcacatctattcatcctccacaagacaatgcattgagcttttttaattcacagattttatgttagtcctttagaacccaatgcccatgttccagttcagaactgtygggctattcaggctgtcttcttggtgcaagctccttggaggtcttgtaaattgatcttcgacctatggtagaaaatgacaaagtagcaatatataaatatcaggagtgtagaattttaacttggaactacagtagatgaatagtaagtttttacactgcatattttttgaagtatagggggaacatgttaaatatatctttgagtcttacctgttgtgaatcatgtgacttttgacaagatgtcctgctgccaatgctgccataagtgacaattccccagccattacggtcccacacacaattcgggcaagctgccgggcattttccccaggattatctttgcatgctccttgaacacctagcatctgtagccagggagagacacaacaagattcacccttaaaatcatgaccaatttcttactaaatcaactaaaaacagggcaactgtaatggcatcagaatagaactagactccactggaagcactaactttccaagacttgacagccacacctgacagtgcataataccatagctaacataatattcacagcctgactggcagtacccttaactcagtagatgaacattcatttgctctcttcatctactttcttatctaagcataagcttaaacatgcttatttggacacaatggattaggctgatatgacaaaagagtttggaaaagaccaattaaaatagaggtgagtgatacatagtctcagatagaaagagaaacccagagagtcagaactaggcttgtggactctatgcctgatacatcatacctg

SEQ ID NO: 31 - DNA, 933 bp, Homo sapiens
ttaggacctatagatgtgaatttgggcaccctttccatttatgttcactagtcacttggttacagcaatttcattttagagattccttcaccgaataaaagcctttttaataatttctttacctgtaaaattacagatttggcctaacttatggtcaaatttaaaactttattaaaacatacttatcttgatgactatactgaataatatcccagaatccacaagagtagttttgcccaaatgaattaaatttggaagatgattggaaatgataaacattatttccaaaggaaggaaattcattttttacaaattgaaaaaataaataaaaagattccatttatcaatttactttttggttagctttactgggatttagatttgaaataaaaagttagcattttacttatttagataaacaaatctgttatacttaatgctcatttatattagtttttcttctcatatcatatggatgtacttgcttttcacatttgttccctaaaacacatgaattcacccacaatctccctaactttattcccattggttcagcacattatactttcagctatatgacatttctaggtccccaacttttctcttcctatctctgtgttttattgtccagaggctttgcaaacagacatgattctgctctaaaaacttgaattattaggatttcaaaaaagtcttctttttccttccaaaataaaagacacttggrgttaaaagagtttaaataaaggcagtggatgtgaataaccacatgcgaaatgacattgtttagctagcctgtaatgctcaactcatatttaaggtaaaagtaatgtgtttatttcatccatgctgattttttttggacacatggggaatttgtaagatattgtttaaaatttctaaatttcctttatgtcttaacaaatgcaaatc

SEQ ID NO: 32 - DNA, 401 bp, Homo sapiens
ctcacagcagtactcctaaaattagatggctataggattatacaaatcaccttaattcttaaccccctaacagagtttatagcttattcctccttcttactatccttttgagaaataatcataacaagctccttttgtctgtgccaaactgatctaaaatcactcattacttttccataagccacatggcacttgttatcrtagcttttctcattcaaaccccctgaagttttaccagtgcaacttccctaataactgcccacagactaacctcatccctattattctgccttgcaaactcaaactacaaacgagttcacagccaaaccatactactaacacaaggccttcaaacacttctctccctgatagccatgtgatgactcctagctagtcttgcc

SEQ ID NO: 33 - DNA, 516 bp, Homo sapiens
tttgtctttctaagtctgtcattgtcagaaatagcggagtgagttgatgcattttgtgaatacagaaacattggggtcattgtattatataatcatttaatacagtggcaaaagtttaaagtgctgtttctcctctttgtttcacagtgttttgctatgatttttgactgaaggtgaagggaagtgtgtgtgattagaaatttcatccartaagttctctactatagtagtcatgtgttttattcagaatggtcatgaaaattgaacttctctgaagattcatttgatggctgatgtgaaataaatatctgtgggttcagggcaaacataagtgcatgaaagaaagaagtaatcagtcagggcccaataggtagttaacagaattcttttggattctgaagaaagccactgtctgtggccaaggttgctggagaatggaagaaattgttcttccaggagatgctgaatgtcctgattctaactttgtggtgcttcatcgttccatattggtaatac

SEQ ID NO: 34 - DNA, 401 bp, Homo sapiens
  misc_feature (286)..(330): n is a, c, g, or t
ccgggcaaggggagggggtgctgggccttagggggctgtgactaggatcgggggacgcccaagctcagtgcccctccctgagccatgcctcccccaacagctatacgggcagctccccaagttccaggacggagacctcaccctgtaccagtccaataccatcctgcgtcacctgggccgcacccttggtgagtcttgaamctccaagtccagggcaggcatgggcaagcctctgcccccggagcccttttgtttaaatcagctgccccgcagccctctggagtgnnnnnnnnnnnnnnnnnnnnnnnnnnnnnnnnnnnnnnnnnnnnnagcctgggtgcctgcaatccttgccctgtgccaggctgcctcccaggtgtcaggtgagctctgagcacctg

SEQ ID NO: 35 - DNA, 399 bp, Homo sapiens
  misc_feature (71)..(115): n is a, c, g, or t
aggtgctcagagctcacctgacacctgggaggcagcctggcacagggcaaggattgcaggcacccaggctnnnnnnnnnnnnnnnnnnnnnnnnnnnnnnnnnnnnnnnnnnnnncactccagagggctgcggggcagctgatttaaacaaaagggctccgggggcagaggcttgcccatgcctgccctggacttggagkttcaagactcaccaagggtgcggcccaggtgacgcaggatggtattggactggtacagggtgaggtctccgtcctggaacttggggagctgcccgtatagctgttgggggaggcatggctcagggaggggcactgagcttgggcgtcccccgatcctagtcacagccccctaaggcccagcaccccctccccttgcccg

SEQ ID NO: 36 - DNA, 352 bp, Homo sapiens
cactataatttaaatttattatgatgtttggataccttcatcatgattcatgtacccctgaattgctagaacaaatgttccatttctctccttttccatcagttcttacttgtgtcttgtcagctaaagtccaggaagagattgaacgtgtygttggcagaaaccggagcccctgcatgcaggacaggggccacatgccctacacagatgctgtggtgcacgaggtccagagatacatcgacctcatccccaccagcctgccccatgcagtgacctgtgacgttaaattcagaaactacctcattcccaaggtaagtttgtttctcctacactgcaactccatgttctttta

SEQ ID NO: 37 - DNA, 559 bp, Homo sapiens
cttgcttttcacacctgtgttttgtgtgctaagtctctggccatggaatctccttcctttattctttgatcttttatgtctgctttatatttggcactgtagataccaacatgacaaggacagagaccttccttcaagaattcacattttaccacaatagataaataaatacagaattacgattcctggtaatctgtgctttaatgaaagcatgagtatgctgttgaggaaaaccagagagcataggatttgattacttgaggggattgtaaagagtgtgaagatgaaatgaaattgaacctatgtcctgaatgtagcctaataaagatgtatcttagccaaaatgaacaacaggatatgaaacttgaaacttcatggtgtgttcaagattgatgaagagagtgtatgaccagagctgagaacagattatgtgaaaagtggaaggaaaartcatggaatatcaggcttggaacaggaaacaagaatgtgcatgtatttccataatgacagatggaaactcaaaatggcaaaagagctgttttaatgtgggaataaataa

SEQ ID NO: 38 - DNA, 121 bp, Homo sapiens
tgtgcgggaggacggggacagcattcagcacctacaccagacagaacggggtctcaatccytcctgtgctctgcgttcatctggaccagtctcaggccccagccatctccaggaagaccca

SEQ ID NO: 39 - DNA, 631 bp, Homo sapiens
taatctgtctaaatttgatgacacaatttaaaatgacatctttgtacaatggaggaggatgacagagatcagtaraaacagtatggcagtagcaaaataagtaaagcactgatgaagtgtctggatttcagcaaaggtaatttgtggtaaggagagccagcataaattgccctagtattgaatgttggttttattatgaaaagtccactttgaacagtaggttcatttctcattttaaaaattccatgctctaatgctgtggtggggagatgaaaacaatctttattgaagcataagtggaaattctagaattgtactgaggcatcctgacataaattccagtctgggaagtaatctaaaagttagtctcttacaaaggtgtttctatttaagcagaggccatacctaaaggaattttattattctaggagtgtgtttcataaaaatgctatttgaccaaatagggacatttggaagggggtttaataattgcatctttcacatacaacttttctttagaatttacaatttacccttagagtaaactctacatttccttagaatttacatttaaatagttcctgctttgcagcagataacatacctttttccctgtgtcaggatcccactg

SEQ ID NO: 40 - DNA, 306 bp, Homo sapiens
atttcctaatccaaatatctttgaccctggccactttctagataagaatggcaactttaagaaaagtgactacttcatgcctttctcagcaggtaatagaaactcgtttccatttgtatttaaaggaaagagagaactttttggaattagttggaatttacatggcacctcctctggggctggtagaattgctatttrtccatgatcaagagcaccactcttaacacccatgtgctccaccctcacaatacaccatcattattgggccagatagaagggcgaattcgtttaaacctgcaggactag

SEQ ID NO: 41 - DNA, 1396 bp, Homo sapiens
tgagatatggactcctgctcctgctgaagcacccagaggtcacaggtaggaccacagatgatgaacaaagtgaatttcagaacaatgctgagaagatggtgccagtatcctccaccttgtttctctcagagaaggctcattctttaaatttctgtgtcatcagctgtaatctgtctaaatttgatgacacaatttaaaatgacatctttgtacaatggaggaggatgacagagatcagtagaaacagtatggcagtagcaaaataagtaaagcactgatgaagtgtctggatttcagcaaaggtaatttgtggtaaggagagccagcataaattgccctagtattgaatgttggttttattatgaaaagtccactttgaacagtaggttcatttctcattttaaaaattccatgctctaatgctgtggtggggagatgaaaacaatctttattgaagcataagtggaaattctagaattgtactgaggcatcctgacataaattccagtctgggaagtaatctaaaagttagtctcttacaaaggtgtttctatttaagcagaggccatacctaaaggaattttattattctaggagtgtgtttcataaaaatgctatttgaccaaatagggacatttggaagggggtttaataattgcatctttcacatacaacttttctttagaatttacaatttaccyttagagtaaactctacatttccttagaatttacatttaaatagttcctgctttgcagcagataacatacctttttccctgtgtcaggatcccactgaaatttcaataactaaattacaaattaaaattatcctgctgaagtgaaaagagaggagaatagaaaatagccaataagtctttggcaaatttctaaaacatggagagacaatggagggctgacaattgacacagcatagaggatggagttgtaagtattagcagaggaagatttatcaagaggagaagctaatctgtgtcactgtgattctcataaggttcagtatttggaggcaccaagagccaaagacagtagggaatgagactgaaaagggaggctctcctgcccaagtttcctccataactccttttatcaggtacctgattttttcccactgggaaagggaagcatactctccagagagactgagcctaagaacccctgtactcggcgacactttacagggccaggaaactgtgagatgtgaagacagaaaaaaaaaaggtttgagaaagatctattcctcagattcaaagactcagcatttttcttcatcttgcttcctgacattcagcagccagctagatactctccagagaagaaacaagtctggagaaaagacctccgtattttgccaacttaatagaaagttatctata

SEQ ID NO: 42 - DNA, 1540 bp, Homo sapiens
agataattgtacctacctctcaaggttgtgtgaaataaagaaagaagatagtatctgttagtcatgttacaccgtgcccagaacttagctgtagtgttcagcagatactagatttttcttccttgaaaaagctcctttgtaatgaaaaatgccacattggagtttatgttatcatcctcacctctgcattcccaagtatctgtagacattcttcattaggccgaggttccctgggaagttcaatttcaggttcctgtgtcaccagtactgatgaagtatcgagtaaggaggagttaccaaccacaaatgtagctctgtttggggtatctgtttcagccactaagggttttataacctcaactgttcaagaaatcaaaagaaatctcacaacacggcacataattttgaaaacagactactttttgacaaagcaatgaaggattgaaagcgaagagaataacaagttaccttttctttctcggtttatccctgtctcttcctctactgaatcacatttctggttatttctgaccagcataggttcacgtctacaacaattgtctgggactttcttttgtgtcactacaggagatgtgatagggttttttaatgagagtgtagattctgtctctgtttgttcaaagaagatgtacttgacagccagaaggagagctaaacttagggtaataacttgttcaatatccatgctgatcattctaaataaaagaaarcaaattaaaatcttattcagaaatgtaaaggacacaatctaaacttacattagcatagagtgttatgattaatatatcacaaagtagatttcaattaacttacttagagagataaaactgccagagggaaacacttggttcaattctcttggacacattttcatccagtcctaatgaaaccttagaagtatctgctgtactgttttgaggagaaggatcagctatccagcgactgtgagcatgaacaagaaccaagcctagagactgaaataaaatttttaaagtaatgtatcctctgcatatcaatagaacttaaatttcttatccctagcaactggacagccagacattatctctcatagcttccccttaccatgaaaaaaaaaaagccccaagcttgctatgcaactaactaaagtagtgaccccactgaactactgaaaacaccccaaagaacaggctttcaacgagagataaggtgggggaacttaaaaagtctgtttaggagagaggggctaataaagaccaggagcctcaaagaaatgaacacattaagaaaaaaaggaagaagggggtgcaatatcattgaatgggccaaaattgtagaaaaaaagaaatcttawaaataatgagattggaactgaggatactaaaagaagaagaaaaccatgtcattaccataatcatcttgaccctctgagttacaggattcggcttattttcttcttcttctaaaactcgggcaaaatggctgagctgccaaattggacgaccctcgcggctttcccgagaaagctacaaattaagtc

SEQ ID NO: 43 - DNA, 364 bp, Homo sapiens
ctagagtataccagtccactccagggaagattggagctgaggctgcttgagggctatacacactctgggaactagggggtctccaaacccttgagaggtttgcaggaggaaaactgcaaggagactggcagaaagcaggctgaagtggaagcttcctggcccgtgctgggctcstcagtgcttgagaacatagatgaagggcagacagtggccgcagacgagggacgctgtgaggaggaggcctggcatgtcttggggccaggaagagctccctgatcattttttccttcaggatgggtaggctcttggtctgactgcccggaaaacaggtgatggaaggaccaaggactacaaaggtcaggac

SEQ ID NO: 44 - DNA, 275 bp, Homo sapiens
agaccacagtcacacactgctgtagtcttccccagtcctcattcccagctgcctcytcctactgcttccgtctatcaaaaagcccccttggcccaggttccctgagctgtgggattctgcactggtgctttggattccctgatatgttccttcaaatctgctgagaattaaataaacatctctaaagcctgacctccccacgtcaagaggtgatctgtgccattttgtgtgtgattcttttattgtcgggtctctagggatttttctggaaggaa

SEQ ID NO: 45 - DNA, 623 bp, Homo sapiens
  misc_feature (489)..(512): n is a, c, g, or t
taccctgggtttctcttccattagatcttgttctgctctctgatgtgtttcactaggaaaatactcttatttacccaaaaattattattaccataagttctgaaaactttcaaaaagaaaaatgggggyaattccaaattccagtagctacagaatcataattgagttgttagatacaggggactgttcctggggcacttatggagaccagtcttgggacttragaattaaacttaaaactttgggcaattcttaaatcttgtgctatgaagaaaygctattaatccttcctattaatgtaaactgaaaaaaggaatactattcacattcctatcttataaataatacttacctgtgagttggaactgagggcaaactttgctaatgtgcttgctctggaaaggtcaatcaaaagtaggaaaaagggcaaagcttcactggaaaagaacaaaatgatcagataaatttaacgggaaaaagtatgatttnnnnnnnnnnnnnnnnnnnnnnnnacctttccccctccatactgtatgatcctgtagtatgtgtacctttctgcagacaaaaaagtataccctatatttctttggcatcctcaaagctaaacatagtagttgctc

SEQ ID NO: 46 - DNA, 470 bp, Homo sapiens; identical to SEQ ID NO: 8

SEQ ID NO: 47 - DNA, 490 bp, Homo sapiens
  misc_feature (380)..(452): n is a, c, g, or t
gaactgaattggggtgtagaagggtaagttgaaaagggagtttctattttttaattgaggtgatccacagtgttctcagttttaaacattccttagaaaaccatttacaagttaagagatgcaaaaatggcagagcaacccaaatcaaaacctgaaattgaattacttttagaggtttcaaatatagtcattagagaaacttaacaatactaatcttgaccacattatagctcatttgtgtattagtggataaaatgttgattcaytatacaatcaaagggttccataaatagaaactgttttagtaaggtcattgatactgatacactgagctctagatcctacaattcattgaatagcacctaccacacaatagcttnnnnnnnnnnnnnnnnnnnnnnnnnnnnnnnnnnnnnnnnnnnnnnnnnnnnnnnnnnnnnnnnnnnnnnnnnagaaaatgaggctgggtgacttgctccaggtcacagcc

SEQ ID NO: 48 - DNA, 480 bp, Homo sapiens
aaagaaaaataggcaccttgcatctaattatctaatgagtaaattatgtcatgtaatgagtaaattatggaaagttcaattgtagctgatgtatagttcaactgagttaaatcttaccatattgttcctttttctaatgagctaaaagcatatacttttttcctggcaaaaagttcaaatacaatcagcctytctctttttatttctattttctttctttttggacccataataggcatcattcttcaaaatgatttccatgattgggccagaaggcctgtggttacttttctctttcactcggagattgcacctcatttactaaacagatattgtgtaattaaagatgggctgtttctttgagttctctagaaatttttcaattctaaagtccccagtggtctttcaaaaagtttgtttaattgaagcaaaagaaatagtggggccattgttcaggattatcagtgagaggtcatttac

SEQ ID NO: 49 - DNA, 567 bp, Homo sapiens
  misc_feature (93)..(258): n is a, c, g, or t
ctgctccaccctgaaaatgccgagtaacaaatgggactggatttgaacggtgttgttaaatagcgcttcacaaagcactctcccatgcgctcnnnnnnnnnnnnnnnnnnnnnnnnnnnnnnnnnnnnnnnnnnnnnnnnnnnnnnnnnnnnnnnnnnnnnnnnnnnnnnnnnnnnnnnnnnnnnnnnnnnnnnnnnnnnnnnnnnnnnnnnnnnnnnnnnnnnnnnnnnnnnnnnnnnnnnnnnnnnnnnnnnnnnncgtcaatctctcgcctgctgcccagatgtgaatctatctgtgctcctccagccaaaggaccgggatggtttccagattcacatgcacatgaggaaaaacatctggatartttagaacttctcaggtccacagcagtgcaggtcagcctgaagggccgggggctgggggaagctcattgtcaccagaagatgcttcagatctgttctctcctgtctgaccctcctggcccgggttgaaccatcctccctatgtcagccaaactggaagtgcaccctggaggcccagccaatgtttctctgggtaccaagt

SEQ ID NO: 50 - DNA, 490 bp, Homo sapiens
gggaatcacacataaccttaaagacaacctccggggacagtgagccagaaaacatgcacactacagagtcaggaaacttgaatttattcccaattcaaccagaagaaagccaggtaatttcaatgaaccactgaaactatttggataagggtaagaagaaattaatcttcaagaaataaataatagagggaaacatggagaagaacaaatagagtggtagcgtgtttttaaaatggagagcagtcaatactgcccttcttttcacatrgttaaccaatcaatcaaattatcattttttctagatacaggaaaatgtgagaattttactattttaataagttattggtctcagtcttttcctctcattcacatctgtatattctgaaaaatcatttatttgcatttagttggcttgtagaaagaatgactctgtgtctgtcccctcactgtaacctcataacctacccctaagacataaaattgaaaaata

SEQ ID NO: 51 - DNA, 759 bp, Homo sapiens
tgtcattgacttgttattataaaagtttatgtatgaaaaacatttcaaccattggaaggctgtgctccaaaaccccccacaacatctatagggagggctttcttactatcatccatgtactttggcagaattctacctgaacaacctgttaatttgttccagagcccaatcatctatttctacttattaatgcatagttaacacaaatagcatttccaggcttctgccatgtgatgtgtcaatgtgacccccataagtaaaccatagagaatctgaatctccaaatgtttgatcccttctaatttgccactgctgcatagatgtagccttcccattctgtacctgcaygtgactttgaggccctacgacttaatcttaagctatgaccagcttctagaataagttttcttcactttaactttggccaggtgcttggccaaagtttcccagctgcattaatcctacaggtttgataataggtctaatctgtgtcattagtttctgagtcaaagatcccacttggacaaaattcgagctttatcagtataggccctttactttatactttggggaagaaggggagcagcatggcctctggctcctggcaataattcaaccttggtatcagatcaggttttacatcccgcattgctccttccaatctttccatgccattccaagactccaaatgcagtctctcagcaatgaggtgcccaaaatatgaacatctcttattactggcttgtggacaagggctag

SEQ ID NO: 52 - DNA, 995 bp, Homo sapiens
  misc_feature (138)..(441): n is a, c, g, or t
  misc_feature (648)..(795): n is a, c, g, or t
ccaagggacaaagaagtgtcccgttatatctcaaaatctaggttttgcccagtaacttaggacttctcattctaagagactacgaagcaaagagagaagtctgcatcctggaagggctaaatgatattgatcattagnnnnnnnnnnnnnnnnnnnnnnnnnnnnnnnnnnnnnnnnnnnnnnnnnnnnnnnnnnnnnnnnnnnnnnnnnnnnnnnnnnnnnnnnnnnnnnnnnnnnnnnnnnnnnnnnnnnnnnnnnnnnnnnnnnnnnnnnnnnnnnnnnnnnnnnnnnnnnnnnnnnnnnnnnnnnnnnnnnnnnnnnnnnnnnnnnnnnnnnnnnnnnnnnnnnnnnnnnnnnnnnnnnnnnnnnnnnnnnnnnnnnnnnnnnnnnnnnnnnnnnnnnnnnnnnnnnnnnnnnnnnnnnnnnnnnnnnnnnnnnnnngcttaagtctatcccattaaactttttcttgcaacttatgcccaggtaaaagargaccagtagaatcttggagcagctcttctataacttactatataaagcaggaagtggactatagcggatactgtggtgtgtcacctagattcatcagtcctacctcaggactgagcactcattctccagctgcttgctttgctagaaattgannnnnnnnnnnnnnnnnnnnnnnnnnnnnnnnnnnnnnnnnnnnnnnnnnnnnnnnnnnnnnnnnnnnnnnnnnnnnnnnnnnnnnnnnnnnnnnnnnnnnnnnnnnnnnnnnnnnnnnnnnnnnnnnnnnnnnnnnnnnnnnnnnnnatagttctctacccaaatttgctttttaggatcaccctcaggtgttaatcctgagagtgtgctccagtaaatttcctgcatagaaatcttcagagcaggcttcctggagacccctatctgagatgagtcgagagaggaaggagatagacaaggagatgaagtgcggggaccagaagaaatatcatattttctcatcatgt

SEQ ID NO: 53 - DNA, 936 bp, Homo sapiens
atccattagcttcacaagtagcatgtgaccacagtccaactataacaatgcaatgaatgatcagtgaccaatcagaacttctgtgagaatttgaaatttggctttcaaagaatgtagattcacaagtcatgcaaatttttgtcaggaatgaaagttctttttgtagcaagaagtaggcgacttactaagaaaacagagtgagaaataatttgactctagagggatggaaaaagtagttgccctgatggcttcacaattcatgacttcaacaaggctcaattstgcttttccctcatatcccttcgaaacatttcctctttatttgaatggattcctgttccttgtcaccaaagaaacatcaatactaatactcttggtgatgcatttacaaggagatctaatgaagcccatgtatgcaggatcattttaaaaagacactgtagttctattttgttggcacatagatccaatttaagttcagtggctcaaattacactgtttaattgcttgaaaatcagcagaatttggtggtactttcttagagattaactcttggagttgagtagtatcctcaagacttgtcaaaatattaccaataaggtattgagatactttcataagataacaaagtggctctaatgataatttcccattcccagttggcttacatattaaataccaaaagataattctgaactcgtgcacttctattgctcacacagtcttttaaactgaaagcatgtccaattaaggacattaatgtttataaagttgagatacatgttttaatactgatttaataaaaatttgtcacatccttattacatgagatctcattgccacgagtaaatctagaggtacataatgcagcccagtaaataagtgcatagtgaaataatgcgtctggcttagtacaagtcagcttagatcttttta

SEQ ID NO: 54 - DNA, 354 bp, Homo sapiens
  misc_feature (125)..(148): n is a, c, g, or t
tcttgagatccatatacctttaacaacatcaataaagtggttatttgcaacttcagatattaatgaagataatactttttaaaaataactaaaccagaagtttgaaatataatcccacaaaactnnnnnnnnnnnnnnnnnnnnnnnntaacatatgttgatcatatttgttggctctagggattccaatatcattctctggtttctaatatttaagaagctgggaataatttgtagccagtttagcyagtggaataatatttgagttagttcaacatgactcctcctgtttatattattgttattgtactccatcagatttgtagttagttgctaaattctcattgtgaaaac

SEQ ID NO: 55 - DNA, 396 bp, Homo sapiens
acgacttaggggtcgagaagaatgcagtcttaaaaaccttgctttttaaagtgcactgttaactgtttaaagaataaaggaaggttccagtgcccttttctccatcggagtgtcagtagattaagcaggataaaccttttgcctgagtgttgctgcaatatttaaaagtacaaatccaatatttctggtccacgtrgatttctatgaatagcttcccagcaaataacgaaaaaaagagagtacgtatgttgtgaagtttgttctgtttattagcaacttcccgcatacttcaactttcaacaattttactctagaggcagagtaaagggatactttctttaggaggtgactcttactggacgaacactcagtgtttccaaaacgtttgtgagatct

SEQ ID NO: 56 - DNA, 424 bp, Homo sapiens
catatctgttgatgtaattgttatccttgtgttttttagaaggaattggtgtgtaggggtaaaacaggaaagcgaagaagatattaaacttgcaacaagaaaaagttagaaacttcgatcacaaatgctgagttcccaaggttgtaaattttcagttcactttgacttttcccagactctttggtcaaaacaaacaagtaacaaactaaacagtttttctatcaccrttgcaaacctgatatgaaatcagagagtaggtatgtgttcatggcagttcaagaatatatcacgaggttaggtgcatgtgcctataagaatagaaagtggttcttcagagatgtgtgtacttagatcagacatgatatctatctaaaaaaaagaatgatgctgagctaagatggaggggagacctccacagcccaga

SEQ ID NO: 57 - DNA, 560 bp, Homo sapiens
tctaagagagaaacatgccacgtcagaaggaaggagaatatgacagcagattttggaatcaattgtcaatgtagtttgctagcttatcatggtttcttagacactgtgtgagcaaatctcacaaatggaactgatttaccataaaaatgtgcctaatttccattaaatcttgttcgttgctttactgaggcactgaagttaccaatgttycactggttgacctgcggggctatctctaggttatgttactccagaaaatgaattgtgtataaaagaggccttggaggaaggcgttttattcgcatcagttgttttgcacattgcttaagctagagatgttagcagcttcttaaagagagcagcgttagccagacctttggggcaatagtgggaaatggaagtttctctgtcctatgcttgatagaaccatgtcggttgagacacgtttctatcatgcatagggcagggtataagaaatctgttttcagagacttcatgggataaatgaaggcttaagagcccttcatatctcagttaaaatcccagagctgctatttgcc

SEQ ID NO: 58 - DNA, 613 bp, Homo sapiens
tacacctgaagcaaaacttggacaaatgtcttgggaatgtctttcctgatgattttctttcccatgcctccctaatcatggaagtcagcctttagtccaaagataagggtatataaaaaagctctatggcagtaatttgctagatgagaacagagaattattgctattttctaattctactctgaccttggtattctagaactgaataactctttctaaacttgtaccacattccacaagttgttggatttttctgaccctgaatcctaatatcccactaacttcattcctgatacctacatgtaaactatcctcatgtagcatttttaatgcttagatcaccatccatcatctttctttcattcttgcttctgcttgccacatcctgaacyctggttagtccttggttaagaataccttcatccatttgggtctgtttgtttctttgtattttaaccctggaaagacttcctggtttcagatagtctttctggtttcatagtccatctgcccttccccaaaataacaaagagatgtcttatcttgcttcctcctggtcttcacctatctctaaaacaccttcactctctagatcccaggttttcctaggctg

SEQ ID NO: 59 - DNA, 620 bp, Homo sapiens
  misc_feature (7)..(7): n is a, c, g, or t
  misc_feature (46)..(88): n is a, c, g, or t
  misc_feature (334)..(371): n is a, c, g, or t
  misc_feature (593)..(593): n is a, c, g, or t
tctaganaacttcccatcattctcttattccatagaggcacaactnnnnnnnnnnnnnnnnnnnnnnnnnnnnnnnnnnnnnnnnnnntagctaggcatatgattgcttggtatagatactatatttcctactagacatccttgaagtcacttgtagatcatacatgaagtttgaggaaataaaacgtaagttaacatgtcacatttttctttattcatttaagcatttattaaatgttagacatggtaatacaatacacatgaggtataaaaagatgaatattacaacaattacctttttattattgtctagtacacacaatctcttataaannnnnnnnnnnnnnnnnnnnnnnnnnnnnnnnnnnnnncatatgcacttcatggaagctttgggaagcctttcttagaggatgattgatgcaygccccttgttctctttcactgaagcttcagccttcttgatggctgaaacttcaatatgatggtgacaacaaaaatgaaatggttggtactctagcaatgacctgcagtgaagggaagcactgtttcctacaatgaagagttggaataagcctgggactctgagagcncctgtgagccagaacctacgtattagc

SEQ ID NO: 60 - DNA, 490 bp, Homo sapiens
ggagctctgggaaaagcttgctgagcaggcagaaggctgtggtcctgtcccacctgtgagtcagtgccactctctgggactgggggtttcccaggagcgttgtatttatggcctcctgctgcattctcctacctcaaggacacagcaagtgcacaaggctgcctacctctctcccaactccactgttgctgtgctgttggcttcgccacactgcctgccctcctcaaactttstgaacctcagcttgtttgctttccagatcaaatccctgttcctagttttttctgctgcccatcagataggtctctagactagctctgttctctcccaggaaggaactgagagtccagcttccccctcctccccaaacacagtgttgagcataacagatcctctccccacaggaatggggagtgacccgcttgacctttgaatatgactctgaaccctttgggaaagaacgggatgcagccatcatgaagatggccaa

SEQ ID NO: 61 - DNA, 587 bp, Homo sapiens
ctgggagaacccatagtcttccaccatcacactgtaacactgattagttaaccatattagttagttgaagccttagatctggagatgatgaaagttagagccagctaaactggaggagtggtgtggcagggaaagaaggaagcccaggaggttggacacagtaatcctaggctggagaagayacagggaggatgagaaaacagaaatttgggtgcctagaaatctggccctagaaaagggaaggaatagttttgtccaagatcagtcctagcctgaaaaaagaagaaaagggagaagtaaagaaaagggagaacagaccatcatcaagtcaactccattaactttgtgtgtgtttccattcatgaagttttgttataaactagtgataggaaactttaaaaatctaatattacctaaggtgggattacatgattcccttataggaggctgatatgtggtaggatttggggattttggagatggtcccaaatcttagctaaaagtatgtccacagtccccattaggtgtctgaaattctgttagggaaggtcttcatgacttgtcttccctctgccaaggaaaatggc

SEQ ID NO: 62 - DNA, 490 bp, Homo sapiens
  misc_feature (140)..(217): n is a, c, g, or t
aacaagtgtttaaaatgttttgatcatgttttctttatgatgagctattttagccctcttctaaatgtcactctagaaacatacctacataattgaatagatttattaaaatcattttggcaatattttataagtggtgnnnnnnnnnnnnnnnnnnnnnnnnnnnnnnnnnnnnnnnnnnnnnnnnnnnnnnnnnnnnnnnnnnnnnnnnnnnnnnggtatgctataaatatgtacaagatyggtgctaactggttttcaggggcctataggaaggtaagtcctatgagaaataattaatttttattcttattcttgtctttttaaaatttgcttttgtgttacagaaaatgagaagctgcctccaggatagggggagcttgttttgctgtggagatagcttctagaaggacagaattatgattctccatagttttgccaacatgtatttgctagagggtttggcttagaagctttaatggctatggag

SEQ ID NO: 63 - DNA, 322 bp, Homo sapiens
agtgccaggacctattctaggtgctgggaagtaagataaagccctggcatcatagaacagccatgatgattcttcacagagattcatgaggtagcagtgagagattaggagttattaataaatagcattttctttgtaagtaaatgacgatgaatcccagactaaaggattcacaggtggtcaaactgtgaagctaggaccggctagagaacagcaatcaggtctcatgamcccagccattcgtcatttcttccatacatgccagacatggcccttcactgctgatcaaaaggacacagaataacagaatggtgccttagat

SEQ ID NO: 64 - DNA, 497 bp, Homo sapiens
tctagatccagaacttagcttggttctttgttttctaattaacgaagagctctttcatctgatgccatgagaaagcytgtcaatcctgctgtcagattactcctatatctgcctttccatgggaaatattttaacgtgctttacaggacagtgagtgggatttcactaagctacaacaatacattggtgactgcttttctttctagttgctaagaaatgatggtgtctattgcaaactcctcttgtcacttgctactattataacacacagctggtaaatgaggttctgaagcctgatagggtctacctacctttatttattaaaacatacccaaatttatgaaaagaatctgacaattgtaaatatgtgaattaatttagatcaattcatcatgtatccaaacttggcagaattcaccaacccaaaactgtcagttcaaccttaatccctccgtgtttcctctgctccaactctacgcgttttataatcctgcaaa

SEQ ID NO: 65 - DNA, 812 bp, Homo sapiens
  misc_feature (613)..(690): n is a, c, g, or t
tgcttttctgttgaggactttagtggaggagtgtacacaacatatgctgataaaataacaccagaaggaactaccaaaacatttaagagatcacaatcaccaccctaaccactgtgggtttttgttaactccactattgttttactagaatctagactctgacaaaggtaggattggacaaagttcactgcctgtttcccaaaattctcagatgtttcattcttaatgaagtctcaaaattwatgttccagtcccaggccacatatagttgttggacagtagacaccattcagaggattctactccattcactggccctacaaaagcactgattcttgtgccatcactctcagcattccactttcttcatctttattccattcctcagtttgacatttaatactgaaattgtaaagtaccaaaacatatttcaattgtcaattcaaatgatttcatttgcctttcactcgttctagattttcccttcctccaaactctccttttgctttttccctacacttattattggttacttatactgatacttacccagaatgtaatgggaaaagcactgcatctgattttataacatctcagtataagctctagcagnnnnnnnnnnnnnnnnnnnnnnnnnnnnnnnnnnnnnnnnnnnnnnnnnnnnnnnnnnnnnnnnnnnnnnnnnnnnnngtttcagcacagagatatttaaggtccatttcaaaaaatattctataataggaggaaaagggtagatatagccagcctcatagaaagaaatgtcagtaacaagtgtgaaagaaaaaaacatt

SEQ ID NO: 66 - DNA, 613 bp, Homo sapiens
  misc_feature (149)..(311): n is a, c, g, or t
  misc_feature (556)..(577): n is a, c, g, or t
cttactattgcactaaacttagaatgcatagtgccctcaccaccccctgcaatcttttctttcactcatttgatgggggaaaattcagtacattagatgtttccaaatatacccctattatcaacagtggccctttataaatttcaatnnnnnnnnnnnnnnnnnnnnnnnnnnnnnnnnnnnnnnnnnnnnnnnnnnnnnnnnnnnnnnnnnnnnnnnnnnnnnnnnnnnnnnnnnnnnnnnnnnnnnnnnnnnnnnnnnnnnnnnnnnnnnnnnnnnnnnnnnnnnnnnnnnnnnnnnnnnnnnnnnnntcaacagtggtccttgaccagcactctgctgccacccaaaaaatgcatgagaaatggyctctccgtgagctagttatcttcttttgccatccggttctatttttatcagttcattacactccttctgacattggctaggatccaggcccttagaaactgcctggcaaaaagcactctagagagggcatgctgctacataaaatgcatctgtcaccccaatttatgcaaatcacaggcaaggaccnnnnnnnnnnnnnnnnnnnnnnctagtaagaactttctaatacagaagaaagaaaatt

SEQ ID NO: 67 - DNA, 401 bp, Homo sapiens
tctctagaaacagcggaaggagaaaatgtctctatgagattgagtacaacagcaactaaagggactgaggtcatgcattccacttctgagcttatggccacgtccaactcttacaaaaaataacctttctctcctgcactcttagtagtttggccaattttatatggacttgtgctattcctttactttttggcttaagcrtatatatgactcccaaggccatgaaagccctaaccatttggctgagggtggtattttcaggaactccaccagtgaagcagatactatgtattggacaacatcatgtgttcctaatgataggttcttattcaaatgacaataaatattgttagaaaattcaggcgtaagtttgagtgacaatagtgataaaaggaaagtct

SEQ ID NO: 68 - DNA, 422 bp, Homo sapiens
  misc_feature (237)..(280): n is a, c, g, or t
cagtcaactagtttctatttttgcactcatctgctctgatctgtttaggcagaagcttaaacaattctgcttgctcaactaactcagacactgtggatgttaggatgaaggtacagtttgcatattaaaagatargccagtacatctctgagatttgccatcctctctggtaaggactgcactcaaagtaacaggagggcctaaccttaaataaatatgcagccatactgctagggnnnnnnnnnnnnnnnnnnnnnnnnnnnnnnnnnnnnnnnnnnnnacaggctttctgacaagtgattgatagatttatttcaaagctgtcaagtagagcccaaaaagagtggaatctcacggttctcttggcaagactatggttctcagatgggcatacaagctctttcctttctgggacagtcaca

SEQ ID NO: 69 - DNA, 462 bp, Homo sapiens
  misc_feature (214)..(391): n is a, c, g, or t
gttcaccatctaaatcagttgtcctttatggtaacacaggattcacagagcagcaatctctttttgggtcaggcagcaacctttatttgtgctctgcacttcacccacatgtttttgtctgggatatttccccgatcccattcttctgttgtttcacactacttsttgtccttctctcccacacctaggcagttccaagcctgagccttttctnnnnnnnnnnnnnnnnnnnnnnnnnnnnnnnnnnnnnnnnnnnnnnnnnnnnnnnnnnnnnnnnnnnnnnnnnnnnnnnnnnnnnnnnnnnnnnnnnnnnnnnnnnnnnnnnnnnnnnnnnnnnnnnnnnnnnnnnnnnnnnnnnnnnnnnnnnnnnnnnnnnnnnnnnnnnnnnnnntgctggtactagtgactcagcaacactccatgacactgagctcctctgcccattgcacctcctcctgcagg

SEQ ID NO: 70 - DNA, 490 bp, Homo sapiens
tgatacacttttcattaatgtttattcttgtatttctgctgaaaatatttctgttaaactagttaaatcttctatatttccattcagcagaacatataataatgctagatgattgctgtgtcaaaaaatattttgttctctcaccttatactaatgacggtaataaatctgaccctccaggattttcttattgcttttttttgcaggccttragtatggcagaaaacatgatgtagtgaaaaatacctggggttagtctagaccctgtcctgttacgatccagctctgagtccttaagtccatctactgacatctcagaaaatgtttgctcataaaggaaaaataatatttcacatggatggatctgtatttcacaagataacataacgtagttgaaaatgagtaataaggcataaaactctacaatattataattgcagctccacagctttaggaaaattactccctgctctgtattctcttatccatg

SEQ ID NO: 71 - DNA, 525 bp, Homo sapiens
  misc_feature (48)..(167): n is a, c, g, or t
tctagagaaacctcccaaaaataaggcataccatccctctgatggttnnnnnnnnnnnnnnnnnnnnnnnnnnnnnnnnnnnnnnnnnnnnnnnnnnnnnnnnnnnnnnnnnnnnnnnnnnnnnnnnnnnnnnnnnnnnnnnnnnnnnnnnnnnnnnnnnnnnnnnnagattgaggaaaggaagcaggcgggcagctggtggtcttccaagcactatagctgatcagcaaccagagattccagagaaacatggaatgataccttaaagtgctgaggctaactaactgctgagcacaaaggatattttttcaggcacacacagggattctgaaagtgtaaagacgagtcccaggccctcatttgaatattaaaaaaaaaactawagcttgatcttcaggaaaaatggaaacgaattcaaaagcagagactgggatacaaaaaacaatgaagaaagaagtccgtgaacatgttgacaaatccaaattagtatttcttataaataataacattgataactgatctaga

SEQ ID NO: 72 - DNA, 544 bp, Homo sapiens
tctagatccttttatagacattaacatatgctttatactttaagttctagggtatataaaaaataaaacacataagctaatgagttctcttttcaattcttaggatttaaactgtcttatggagagatacctaaagcctcttcaaaaagaaacttttctcacccaggatgaggtatgctggaaatggtttcaactttgtgaccatcataccgtggtttgacttgttggtaaagaggaaaaatggggacatgcgkaacactgaaaacattttaaatttatttaattgtaactagctgaaattattgcctgctaagctttggtgtgctcatgaagagtaaaaaactgccccgctctctggtagtgggattattctcttaattgataagaattgatagaaaaaccttgtaatcagatataaataacgtttaggaagactaatgagatatgaggtgcattaaattctgttttatttctagcttgacgtgctttttggaaatttaacggaaatggtagagtttcaagtagaattccttaaaactctaga

SEQ ID NO: 73 - DNA, 1136 bp, Homo sapiens
  misc_feature (511)..(542): n is a, c, g, or t
agaaattgaaaggatagctagtaattttttttcttcctagttcaaaatcttccacaagttttccttgcatcttctccaaacttgctgttttttttcctgtattcattatcttagtgagtaacattgtctacgtagtaactctaattaaaaactttggtatcatgttcaacatctcctttgattcttgtgtacccctttacttaccaagtcctattctttttcttagctrctaaaatctgtttctccctcattcgactttttgcaatactgccagaattgtctttcagaaatatatacttctacataatgctattgttctcatacttggaaacatttttgtttttgaatagcacagttgataacatcctaactctttggtgcagcatacaagatcctcaacagtccttatccaaacttgccttcctagctatatttactactcgtttcttcctaaatttccccaatgctcaagcttccctgaatccatgatattttttgatacttttatacnnnnnnnnnnnnnnnnnnnnnnnnnnnnnnnnaagtttcattataccttacttgtttccgagatccagcccccatttcccttctgttgtgaatcccattgctagtgtttttagacagtcagccccttgttccttagcacactcagttgtgcttttcttgcttgctagattcttcttctagatggagggttcttgaggccacggacctgtcttgtcttttattctctttttgtgctcaatacaaggcctaatgccctgcatcatcatttttgaaatgaaaacaactaaagtttttaaaagctcaagtgactaagtagatgctgatagtattaactgatacacagagggatagattggtttttgagcatgttgagtttgagatatttatgttgcatttagaaaatgttcaggacatagttgagaataggaggaggcaagaaaaacagttacaagcattactagtatgtaggtaatattccaaatcatggaagtttttgagactatgtgcagaatgagaagagaagatagagaagaagataagttgcactagtgactagtgggcaggaaacaagaaaaaaatgaaatgggtagcagttaattttctccctcttttataggatataatgg

SEQ ID NO: 74 - DNA, 376 bp, Homo sapiens
gaagcagctgcgggacggactctagggaccgttcctcttcagggctgcccgcctcagaagggcctgtgcatgccgctgtgtgtgtgttgggggtgtgggcgggtagaggaggcaacgggtacgtgcagtgtaaactgggggcttccctggtgcagacaaagtcagggaccctccatctctgacrcgacctgcgggccatctctcccagctggcccacgccatccgcctgctcctggaatacacagactcaagctatgaggaaaagaagtacacgatgggggacggtaatggcaccctcgtgttcgggctctgcccactcacgctaagttggcaccaagcaacccatggtggccacctgtggctgcctctgcaggcc

SEQ ID NO: 75 - DNA, 312 bp, Homo sapiens
gttcagaggcagaggggagtggggaagtggggttcccatggagggattggggcccaggaggcgctctctccctgtgacctgctagctcagccctaggcaaacctcaccaccccttctttcttgcagctgtttgagctcttctctggcttcttgaaatactttcctggggcacacaggcaagtttacaaaaacctgcaggaaatcaatgcttacattggccacagtgtggagaagcaccgtgaaaccctggaccccagcgcccccarggacctcatcgacacctacctgctccacatggaaaaagtggggtct

SEQ ID NO: 76 - DNA, 619 bp, Homo sapiens
gactctgtcaactagtcctgcgcccgagaagctccacagtaccctctccgaccccacagcagggcgcagtcacacctctcagaggcacccacactgccccctctccctgcaggcgytgggtcctccaacattctggcaggtcctggtttgtctccccactagacgggggctctggatggacaggccagccctgcctatactctggaccccccacccaagtggggacagtcagtgtggtggcattgaggactaggtggccagggttcctagagtgggcccacctggcagtagccatgctggggctatcaccaggggctggtgctgagctggggtgaggagggcgccaggcctaccttagggatgcggaagccctgtacttcgatgtcacgggatgtcatatgggtcacacccagggggacgatgtccccaaagcgctgcacctcatgaatcacggcagtggtgtagggcatgtgagcctggtcacccatctctggtcgccgcacctgccctatcacgtcgtcgatctcctgttggacacggcctggacagacatgcgtccccacaatgggtcagcacccagggggtccggccctgacactccttcttgcctcctatgttg

SEQ ID NO: 77 - DNA, 401 bp, Homo sapiens
gggctaaatatcaaagcacactagatccctgagtcaacaggggacagtgccaggctttggtgtgctatggtgtccccttctgcacagtgggtatcccaaggacctgcagcctttgtaagatggtaggaggccaagggagatgtgactggtgagtttttagggactggtatttccagctccctgcagttggcaatctgtcamcctgattgtctcccagcaaaggacaaagaagatggtcaatgagataggaaaggcctgggactcctgcacagatctgcctctattgtcccagctgtctaggacatctcagcactgacaagccacccttaggagggtaaaatctgccaggggtagcttcttaggctagggcagggtacagctggtaagaacccagcccaccc

SEQ ID NO: 78 - DNA, 631 bp, Homo sapiens
taatctgtctaaatttgatgacacaatttaaaatgacatctttgtacaatggaggaggatgacagagatcagtagaaacagtatggcagtagcaaaataagtaaagcactgatgaagtgtctggatttcagcaaaggtaatttgtggtaaggagagccagcataaattgccctagtattgaatgttggttttattatgaaaagtccactttgaacagtaggttcatttctcattttaaaaattccatgctctaatgctgtggtggggagatgaaaacaatctttattgaagcataagtggaaattctagaattgtactgaggcatcctgacataaattccagtctgggaagtaatctaaaagttagtctcttacaaaggtgtttctatttaagcagaggccatacctaaaggaattttattattctaggagtgtgtttcataaaaatgctatttgaccaaatagggayatttggaagggggtttaataattgcatctttcacatacaacttttctttagaatttacaatttacccttagagtaaactctacatttccttagaatttacatttaaatagttcctgctttgcagcagataacatacctttttccctgtgtcaggatcccactg

SEQ ID NO: 79 - DNA, 590 bp, Homo sapiens
cgtgcaggacttccaggcctccccagcttcatccacctgcaggtgctcaggatcctgatcccctgcccccttcccaccttggtgaaacttcttgtatccttgtcttgtcctttcctatggcttgtggctcaagaacaaatgtggagcccacactgatttcccaggactgtctgagcatcttctccaccagtttggcccctcgtggcagcagamactagccctgtagcaggaggggttagcaggagccgtttagctcctgcctgagctatgaccaaggtcagggggatctcacctctcccaggatggccctcatgctgtggagggagacagagccctggcctgccctcagcagatttctgggagcctcagtttccctggctgtgagtggagatgactctgtctgtcacagctccaagtcacagttccactgggagagcctcttggacactgtctcctgtgtccctgtggagctgggaggtggctggttctgtgctgaaaggagacaagcagccccttctctccggtctgtctccggtatcacaggaaaagcacagtgcagagcgcttgtacacaatggacggtatcaccgt

SEQ ID NO: 80 - DNA, 400 bp, Homo sapiens
aactcctccacaaggcagtgagcttcctcttgaacacggtcctcaatgctcctcttccccatcccaaaattccgcaaggttgtgagggagaaacgccggatctccttccatctctttccattgctggaaatgattcctaataaaaaaaggggcagaaactgggagaattcacagccaaggaagaaagtgctgcaacactyggcagccatgcagataggctaagctctgctgagaagctttttagggctctgttttccatccccctcaccccagttaccaaagctgacacagaaatatgtgcacctaccaagtcctttagtaattctttgagatattggggaattgcctcttccagaaaactcctctccattatcaatcagggcttccttcactgcctcat

SEQ ID NO: 81 - DNA, 844 bp, Homo sapiens
cttaccatcaccattcaggatgcttgcaaaccaactgctagctgcacctgtaaacacatatctgtttctttcccctgagaaatgtccttagtgtatttgtggcagtgtctagagaaacagcagtgtcagccgcattttaaattaagttatctgcactagtgaattcactggaaagataagagcaatatttggttttcttcagcaccatacacaagcctccaagatgggcatagaggagatctaaaattgcgtgatgttccattaagcgtttttgttgccacaaatgttctcatctcagtttggagagtggcttctacccatctgaactccttggaggttcaattagctgcaaaattcaagatgtcccttaatgtataacttagcctcagattccatacaactgtcacccaaataccaccaagartgagcacccaggaacccaactggaaccttttctgaacagaaaccaacttatcttcgtcgattttgaggttgatagtaatttcagttattgactgttttggcttttaactatgggaggtattaggaaactctcagggaaacaatttggaaagcagcagtgagctaggccaaatagcaagttctggacctgtgaggagaaagaacagagtaagcaaacctcaagatactcaaggtaggcactcgtggtgttggaaaagagggtcacctactggcattagagcagagatcagttagatttgtttacccataagtctgcatagctcctgaacaaggtgggaaacttacttttttgtggtctttttctagcatgctgcgaaggtgcataaccacatttagttggaaagagactttactgtattta

SEQ ID NO: 82 - DNA, 732 bp, Homo sapiens
  misc_feature (285)..(550): n is a, c, g, or t
tggtgcaatttttgttcactgcaacctctgccttccaagatcaagagattctccagtctcagctcccaagtagctgggattacaggcatgtactaccatgcctggctaattttcttgtagttttagtagggacatgttggccaggctggtggtgagctcctggcctcaggtgatccacccacctcagtgttccwaagtgctgatattacaggcataatatgtgatcttttgtgtctggttgctttcatgttgaatgctatttttgaggttcatgcctgttgtagnnnnnnnnnnnnnnnnnnnnnnnnnnnnnnnnnnnnnnnnnnnnnnnnnnnnnnnnnnnnnnnnnnnnnnnnnnnnnnnnnnnnnnnnnnnnnnnnnnnnnnnnnnnnnnnnnnnnnnnnnnnnnnnnnnnnnnnnnnnnnnnnnnnnnnnnnnnnnnnnnnnnnnnnnnnnnnnnnnnnnnnnnnnnnnnnnnnnnnnnnnnnnnnnnnnnnnnnnnnnnnnnnnnnnnnnnnnnnnnnnnnnnnnnnnnnnnnnnnnnnnnnnngaaggaatgttggtgagaatgcctctctcacctcaatgccaactctgtgaagggccaaaccattgtcttgctcatccctgtactctcaacacagcgtgtggcatatgacaggtgttcaaaatatttggtgaggaatgaatgaatgagtggctaaatcagccaccccctacccccacagccca

SEQ ID NO: 83 - DNA, 401 bp, Homo sapiens
acatcttaatttttgctcagctcaaaacagtttctatttgcccttttaatttctacttcaacttattggttgcttaaaagtttattgtttaacttccacgtatgtgtgagtttcccaattttcgttaccttattgattttagctttatcctatgataggtgacagagatacactgtgttatttctatctgatttcttgaasagcatgattaatttaagcagcaaattatgatttgggttatcctaagagaccctagcccaatacataaaggcaaagagattagggcattgaattttgttcctttcatcattcaaaagatgcagaaggggctgctgatctcactgctgtagtggtggtccctatgcacagaccttcccttgctcagccactggcctggaaga

SEQ ID NO: 84 - DNA, 1720 bp, Homo sapiens
gaagtggtctgtagaccaatattggtcccttaagttccctcaaacatatcttcgggaaacgtcctttgattttccctacatttaaccattagtgttgcaaattctctcaaagtttgtcaagatatattgtagctaaaataaattacatttttcttgggggagagtactacctcatattaacttacaataaagtacttttaggatcattcaaggaacacacccataacactgagtatgttatgcggaaatgctctctctggaaattacacagctgtgcaggtggcgggggtggcatgaggaggagtggatggcccacattctcgaagaccttggggaaaactggattaaaatgatttgccttattctggttctgtaagatacacatcagaatgaaaccacccccagtgtacctctgaattgcttttctattcttttcccttagggatttgagggcttcacttagatttctcttcatctaaactgtgatgccctacattgatctgatttacctaaaatgtctttcctctcctttcagctctgtccgatctggagctcgtggcccaatcaattatctttatttttgctggctatgaaaccacgagcagtgttctctccttcattatgtatgaactggccactcaccctgatgtccagcagaaactgcaggaggaaattgatgcagttttacccaataaggtgagtggatgrtacatggagaaggagggaggaggtgaaaccttagcaaaaatgcctcctcaccacttcccaggaraatttttataaaaagcataatcactgattctttcactgactctatgtaggaaggctctgaaaagaaaaagaaagaaacatagcaaatggttgctactggcagaagcgtaagatctttgtaaaacgtgctggctctggttcatctgctttctattactacaataatgctaagtaaaaaacctccaaaaacctcagtggcatctaacaataagcatttgttgctcacactcatttcaattggttttggttgtgaattacatgtttgcagcaggcaccatagtggtgtgtgatgtccccttagctgtatccacatatggacacaggaattggctctttttatctctttttattttcttggttacagacatgtgacttttttttttgaaaggtaacaatcactttctcatatgttatttgatgctagtggtcatagcctatagtcacatttgtttcaatgagaaagaaaaaccagtacacggttatgctaaggatttcagtccctggggtgagagccgtctcgaatgtctccccacttcataactcctccacacatcatagttggatagtgagctctgctgatattggcaggacttgctctggtctggctgtagtctgacggagcctggccctgggtgtgctgtgcaggctgactcagctctccccacacctatctcatgttccagtcaggcagtaactggtgaagaagccaagctaggaaccaggatatctggctcctgagctaaagtcttaaaacactatcatattgccttccaaatataacaccaaatactaggtgcatatcaccctcactgttttcagacctctgccaaaattgggattctttgtggtatgaagagacacggctttggggctggcccggctgtgacagtgaggtgaacacaaagggatgttcttcagagattacagtccagccctgaagcaacaacta

SEQ ID NO: 85 - DNA, 401 bp, Homo sapiens
attttggttctcacaatgttcacactcgctattgtaaaacaactttttgagatttgtcctaccaaggatcccatatgtcaccaggtgttgaggtcttcggtctaaactaggctgagaccattgtggttaccacttttctccaagctttggtggcccagggactcccagcatcacgttctgtccagtgtctgcctattcccytcttctttttttcttcccttgatgcccttttatcacatgcattgtctcagacccttcgaatatgtgctcataaatgcatggcatcatctccttcccacatcgattcactttcaattaaaagccaaaactctttcatttcaactttggatttaacatgcttttgaaagaagggttgagaaatatagagaaacagattggga

SEQ ID NO: 86 - DNA, 401 bp, Homo sapiens
aaatcaatgggatgtttattcccaaaggggtggtggtgatgattccaagctatgttcttcatcatgacccaaagtactggagagagcctgagaagttcctccctgaaaggtaggaggcccctgggaagggagccctccctgaaccagcctggttcaagcatattctgcctctctacaggacagtctgggcttgtacaatcrtttgcttgtctttttatgtttaaaaggttttttcaaatcatgaaattgatcattgtcacactttacaaaccacagactagataaaagaaaactatagccagtcacagtcccagcaacttaagatgaaggtcctcaattatgtccttatgggtcataagtgtccaaaatgtaaggactcttttaaaaacacatgatcacaa

SEQ ID NO: 87 - DNA, 121 bp, Homo sapiens
tcagggagggctcccttcccaggggcctcctacctttcagggaggaacttctcaggctctstccagtactttgggtcatgatgaagaacatagcttggaatcatcaccaccacccctttgg

SEQ ID NO: 88 - DNA, 401 bp, Homo sapiens
tgctgtctccaacattcaccagcggaaaactcaaggaggtatgaaaataacttgggttttaattagaaacttaaagaatgaatcaggtggggacaggtagaaagtaagatcagagttcctttccgaggagtagtctgctgaatttgagcttcctaaaaatagtctttttatgtacagaaaacacatcataaaattcattayacaatgtcacttattgttccatgccaggcaaagtcatgtccttctgggacttatgtctgcacatttaactatgggtggtgttgtgttttgtgcttagatggtccctatcattgcccagtatggagatgtgttggtgagaaatctgaggcgggaagcagagacaggcaagcctgtcaccttgaaacagtaagtaggagcac

SEQ ID NO: 89 - DNA, 401 bp, Homo sapiens
  misc_feature (34)..(79): n is a, c, g, or t
ttttatgtatataacaaaagccctgcttttgtgnnnnnnnnnnnnnnnnnnnnnnnnnnnnnnnnnnnnnnnnnnnnnnatacaaatcctgctttgtaactgtttttgtttgtatatataacaaaaagagttatgaaccagaagtttggccaataatccttgtcgcacagagaatttgctttttctatctgttttcacttycttggttacagacgtgtaacctcttttttgaatggtgacaatcactttgtcatattttatttgatgctagtggtcatagcctattagtcatgtttgcttccatgagaaagaaaaaccactacatggttatgctaaggatttcagtcattggggttagagccttcccgaatgtctcctgctttcataactcctccacacat

SEQ ID NO: 90 - DNA, 401 bp, Homo sapiens
aacaggaaggtttttttttaagtttcagtgcaaactcggagcaagtgtcataattttctgtctccgatgtgtagaggtgacattttctcagaactttcatgttaagctggaaaactggaaagcgagtccactttgtcattctgtcactcactcattttctcactcaacaaacatgcctcacacttatctaaatctgctagrctaaaagaggtccctggtgtctgtaactttctaattctgctagaattctagagtgagctcatgaaataaatgaaaaggatgaagaacaaagagaaaaaagactgcacgttcccttctggcgctcactcacattccctcagcctcagtttctccacatgcccctagaggtgatcattcaaggatttatgagattttagaga

SEQ ID NO: 91 - DNA, 858 bp, Homo sapiens
cttgggcagggattcttactgggtgaaggtgctgggcaggcaccctgtgtgctgggaatccgagaccgacatgacctgccttgagggaactatgacatgctgccgaaaaggaaaccccttcgtctttctcctccctcacctttgttttcgaaactcttatccccattttgtgagcagactgattttcatctgaagcagcccctggggcactgtagctgcagcacactggtcaagggtagcttgtttcttggacactggccccactgagcttcgggtcaactggctgatggcttgagcaggcttgctaacaagggctgcagaaagagactaagccaggatccctggtctcccttaactcaygctggactgttccctttggtctttgtaccgcacgtttccacctttaaagagaggtcagggttccactaggcaatgttgaaatccttttccgatctgattcttggagcaaagcttactttaggctcttgagaagcagagaggaaagtggtgacgtatgcttgctcttcccaatccctccagtggtttatttctggtgaggtcaacaaggagtgccaatgtgagggtgggaggtggggctggggagctgggatcagtgaattattttcataccctgctctcttcctgtttccttccttctggagaaaaaacaagccgtcccagaacttccagtcctgtaagtgtcccagctcaggcattctgagggcgagtctgaggcatgcagttgtgtaatccagaggaactgtccaggcagtcacgtgtaccccacagggaggatgcctcagccctcttgaggggctgcagctgcaatagtgggaccaggtgctgggagctgtcctc

SEQ ID NO: 92 - DNA, 121 bp, Homo sapiens
gcagactttgagaattgcattttgtctgaggagaagccctcagccttccttgtgggcatgyactccccaactgtgcgcagctgcaggacttccaggcctccccagcttcatccacctgcag

SEQ ID NO: 93 - DNA, 590 bp, Homo sapiens; identical to SEQ ID NO: 79

SEQ ID NO: 94 - DNA, 625 bp, Homo sapiens
  misc_feature (226)..(275): n is a, c, g, or t
tccacccacaggcaaggggaaacattcttgtatgcctgcctccctcctggctggtatccctggaagtgctcctttccctggtgtctgtcttatttttccatctgccctcctgggttttccttgccaacttcctggtcacctggccattccccttctctccatccctaccaggtccagaaagcccaattggatgggtcaaggaaaggcttaagtcacaaaaaagccnnnnnnnnnnnnnnnnnnnnnnnnnnnnnnnnnnnnnnnnnnnnnnnnnntccaagccccacttccctccttatcagctatgcttgtgcacctctgcagcaaccccacaagggacagtagaccctggtctcatgctgaccacattcacaacctgtgccctgatcgaggtcgcagccagcttgccactgcctccctgtgcccagctttctcctagctctttagatttatttaagaaataaagaaaactaagataaataaaaaacatgtgcatgagcccaagcgatggccaaacttttaaataaagytagagaactagaagcacctgccaggcacctgccttgattaccccgggagcctggtaagaaggaggacagctcccagcacctggtcccactattgc

SEQ ID NO: 95 - DNA, 516 bp, Homo sapiens; identical to SEQ ID NO: 33

SEQ ID NO: 96 - DNA, 625 bp, Homo sapiens
  misc_feature (226)..(275): n is a, c, g, or t
tccacccacaggcaaggggaaacattcttgtatgcctgcctccctcctggctggtatccctggaagtgctcctttccctggtgtctgtcttatttttccatctgccctcctgggttttccttgccaacttcctggtcacctggccattccccttctctccatccctaccaggtccagaaagcccaattggatgggtcaaggaaaggcttaagtcacaaaaaagccnnnnnnnnnnnnnnnnnnnnnnnnnnnnnnnnnnnnnnnnnnnnnnnnnntccaagccccacttccctccttatcagctatgcttgtgcacctctgcagcaaccccacaagggacagtagaccctggtctcatgctgaccacattcacaacctgtgccctgatcgaggtcgcagccagcttgccactgcctccctgtgcccagctttctcctagctctttagatttatttaagaaataaagaaaactaagataaataaaaaacaygtgcatgagcccaagcgatggccaaacttttaaataaagctagagaactagaagcacctgccaggcacctgccttgattaccccgggagcctggtaagaaggaggacagctcccagcacctggtcccactattgc

SEQ ID NO: 97 - DNA, 401 bp, Homo sapiens
gtttatatcaatatgaagagggatgccctgtggaggcagcccctcctccctgcaggcccaccaagtgatttttacattgaaatcagcaaaccagagcaaaaagaaccagatgtagcaggtcatgggaggagactctgccacggaattctccaaatccagtactcgaggatcccatacccagacactgacaggtgctgcccrccactgagcctcctctttctgggtctcagatgcccacattttaaaattgagacatagaaattcattcctcctgtttacaatccagtcttatggctctcctttgatgactttcgctagattctgctctagtccagctgtgttgatgcctccaattaacagagctccaagggtaatccttgtttccttttcctgctacatgg

SEQ ID NO: 98 - DNA, 363 bp, Homo sapiens
  misc_feature (111)..(174): n is a, c, g, or t
gccccagggtgttttgtagcaagaatccctctatgatgatttaacacctgacgtttatctgcccagtagtttgcaaaatacctatactttatctctttctatccccttctnnnnnnnnnnnnnnnnnnnnnnnnnnnnnnnnnnnnnnnnnnnnnnnnnnnnnnnnnnnnnnnnaaagtggcttagctaactgggcacagygaaggcctgtaatcaatgtttactgaatgaaaatgagccacagccctgtcttcactacacagcacaaggtcaagggcactctcacagcaaagggcatggctgggaaagaggcctctgcagtctcagagtatctcatttccttgatctgggagctggcattct

SEQ ID NO: 99 - DNA, 933 bp, Homo sapiens; identical to SEQ ID NO: 31

SEQ ID NO: 100 - DNA, 401 bp, Homo sapiens
cccacccaaaaactagccaggaatatggaatgtcgttttctccatggtttatatcaatatgaagagggatgccctgtggaggcagcccctcctccctgcaggcccaccaagtgatttttacattgaaatcagcaaaccagagcaaaaagaaccagatgtagcaggtcatgggaggagactctgccacggaattctccaaawccagtactcgaggatcccatacccagacactgacaggtgctgcccgccactgagcctcctcttcctgggtctcagatgcccacattttaaaattgagacatagaaattcattcctcctgtttacaatccagtcttatggctctcctttgatgactttcgctagattctgctctagtccagctgtgttgatgcctccaatt

SEQ ID NO: 101 - DNA, 559 bp, Homo sapiens; identical to SEQ ID NO: 29

SEQ ID NO: 102 - DNA, 350 bp, Homo sapiens
agaatatattccaagatatctcctgagaatctgagtaaatccactacatttcagagagttcacatacttgccatcgggtgaaatgttgattccattagcaaaatcaaatccttctgccaccactcgaacttcacttggactatagtagacaacatacgaccacgctaaacccaaatacatctcccaggatygtaagtaggggtcaagaaaatagtgatcatttgtgccataaaagtgctcaggtcccacagcaacaatatcattcaaactgcaattaaaacatacacacataatatataaggtgaaggtattgaacattacaggattattaactggcattcctcactgtc

SEQ ID NO: 103 - DNA, 305 bp, Homo sapiens
tgattgatcttggagaggagttttctggaagaggcattttcccactggctgaaagagctaacagaggatttggtaggtgtgcawgtgcctgtttcagcatctgtcttggggatggggaggatggaaaacagagacttacagagcycctcgggcagagcttggcccatccacatggctgcccagtgtcagcttcctctttcttgcctgggatctccctcctagtttcgtttctcwtcctgttaggaattgttttcagcaatggaaagaaatggaaggagatccggcgtttctccctcatgacgctg

SEQ ID NO: 104 - DNA, 1190 bp, Homo sapiens
acgatacggcaggggtggaattgaggccatttctctattgcacaatgagcaaatattacctatctttataattaaagagctttaatgtggagaagaaagcactttctggctgcagtgcagtagagagttggtggcaggtgctaaatggaagcaggttggctactttggggatgttgagctaaccccggtgtgagaagagggcggcttggaattagagcagtggttgtggggctggagaggggactaagcccagggatgtttaggagaagagggtgcaggagaggtaaggaagcaaccagggcctgcctgggcagccttctcccctgccctcccagggacttggggcctagctggtgacaatgtgttcctgagtgaccttggccttctgtcatcatttcagatccaggagacggggagcctggacaaagtggtgtcctgggcccaccagttcccgtatgcccacccactctggttcggacagttcattggcttcctgaacatctatgagcctgactatgccaaagctgtgtacagccgtgggggtgaggagagaggatggggatctcaggagagggtggggcttcctgagaacaaagggctcagggcatgatatggggaggaagcctgggcctgtgtactaagtctgcgsagctgaggttcccaccctactcataaatgagcctcctctaggaaccccgggtccctgcttgacctgattgtctcctcctgcagaccctaaggcccctgatgtgtatgacttcttcctccagtggattggtgagtgagcacctgccttccctgccctgccaacctcagacccgtggtgctgggtgactaggatcctggcctgtcccactcaattggttatcccagatggcctagttctcgggtgcccatcctaagctcagctgctcagtggagagacaagggaggagcaggagagcccccagctgtggggccaaggcatcttctctggcagggcctgattctctagacagggcaaaggctttggagaatgtgtgagtgcgaagaacagtttcctgaaggaggtggcactagagttgatccaaaaggagatttaaataggtagtgctggccagggcaagggcctaaggaaatggtgtggtggtaggaccacggctggtcaccagaggctgtgaggctgtcggggtggctacaaggcagagccc

SEQ ID NO: 105 - DNA, 885 bp, Homo sapiens
tgttccccaaccctttccaatcacacaccttacagaggtgctcccagtgcatcccacttggataggtaaacacctcaacaggtatcccctccacttcaacatcttcaccagccccactttaatacctgagcacctgaacaaaagcccccaatccagacccagtaagtatctggacagctgtctccaaccaagcctacttgaatgcctaaatacctagacaggtgacactcacctcataccagccccacctgaagagctaaacacctggacaggtgtcttccaactcaacttcacttgaatatctgaacacctagatgtgtgctccaatccagcctcgtttaaatacctgaaacctggatatatgtctcagttcttctcacctaaattactagaccgtggccctggtacctaaccttcctgaaaacttagatataagttcctatccggccccactgaaatacctaaacaacgagacagatgcctttaactcagttccttccttgctatgaaacaaatcccattcccatcagctcctgccccgtgacagctgtccttcccttcccatcctctctctgcaaccccagctctatgagatgttctcttcggtgatgaaacacctgccaggaccacagcaacaggcctttcagttgctgcaagggctggaggacttcatagccaagaaggtggagcacaaccagcgyacgctggatcccaattccccacgggacttcattgactcctttctcatccgcatgcaggaggtacaccccagcagccactgcggggagatgcaaagccaggcagagggaaatcagtctgggagtggggcaggcagatgacacaggcccattcaaattaaccctcatcataataatcctcacaatt

SEQ ID NO: 106 - DNA, 280 bp, Homo sapiens
ttcttataatcagattatctgttttgttacttccagggcacaaccataatggcattactgacttccgtgctacatgatgacaragaatttcctaatccaaatatctttgaccctggccactttctagataagaatggcaactttaagaaaagtgactacttcatgcctttctcagcaggtaatagaaactcgtttccatttgtatttaaaggaaagagagaactttttggaattagttggaatttacatggcacctcctctggggctggtagaattgcta

SEQ ID NO: 107 - DNA, 400 bp, Homo sapiens
atctccctccaccacctgagggctgacaaccaggatgcgcaatgaagacctggccacccctgaaatgtttccaaggacgtcactagtgaagacaggtaactgttaaggtcaatgacgcagagtagagtcacccacccttggtttttctcaactcctccacaaggcagtgagcttcctcttgaacacggtcctcaatgctcytcttccccatcccaaaattccgcaaggttgtgagggagaaacgccggatctccttccatctctttccattgctggaaatgattcctaataaaaaaaggggcagaaactgggagaattcacagccaaggaagaaagtgctgcaacactcggcagccatgcagataggctaagctctgctgagaagctttttagggctctg

SEQ ID NO: 108 - DNA, 519 bp, Homo sapiens
gaaggaggacagctcccagcacctggtcccactattgcagctgcagcccctcaagagggctgaggcatcctccctgtggggtacacgtgactgcctggacagttcctctggattacacaactgcatgcctcagactcgccctcagaatgcctgagctgggacacttacaggactggaagttctgggacggcttgttttttctccagaaggaaggaaacaggaagagagcagggtatgaaaataattcactgatcccagctccccagccccacctcccaccctcayattggcactccttgttgacctcaccagaaataaaccactggagggattgggaagagcaagcatacgtcaccactttcctctctgcttctcaagagcctaaagtaagctttgctccaagaatcagatcggaaaaggatttcaacattgcctagtggaaccctgacctctctttaaaggtggaaacgtgcggtacaaagaccaaagggaacagtccagcatgagttaagggagacc

SEQ ID NO: 109 - DNA, 232 bp, Homo sapiens
cttgcctatgctttctctcaagaaagcttccagtgtccccttcaatgtgaacccttaagagagctggcatttatgctaggctcgcaatgctttgagttcttttttgtgaggcaccttcagagacaaggttctagccccaaaagggaaataccaggycagaaaggggccaactccacccctaaaacaatagtgccattttgacacttaggaacatagaactttcagggtgatg

SEQ ID NO: 110 - DNA, 1379 bp, Homo sapiens
  misc_feature (949)..(990): n is a, c, g, or t
agcccatctgggaaacagtgcaggggccgagggaggaagggtacaggcgggggcccatgaactttgctgggacacccggggctccaagcacaggcttgaccaggatcctgtaagcctgacctcctccaacataggaggcaagaaggagtgtcagggccggaccccctgggtgctgacccattgtggggacgcrtgtctgtccaggccgtgtccaacaggagatcgacracgtgatagggcaggtgyggygaccagagatgggtgaccwggctcrcatgccctrcaycactgccgtgattcaygaggtgcagcgctttggggacatcgtccccctgggtgtgacccatatgacatcccgtgacatcgaagtacagggcttccgcatccctaaggtaggcctggcrccctcctcaccccagctcagcaccagcmcctggtgatagccccagcatggcyactgccaggtgggcccastctaggaamcctggccaccyagtcctcaatgccaccacactgactgtccccacttgggtggggggtccagagtataggcagggctggcctgtccatccagagcccccgtctagtggggagacaaaccaggacctgccagaatgttggaggacccaacgcctgcagggagagggggcagtgtgggtgcctctgagaggtgtgactgcgccctgctgtggggtcggagagggtactgtggagcttctcgggcgcaggactagttgacagagtccagctgtgtgccaggcagtgtgtgtcccccgtgtgtttggtggcaggggtcccagcatcctagagtccagtccccactctcaccctgcatctcctgcccagggaacgacactcatcaccaacctgtcatcggtgctgaaggatgaggccgtctgggagaagcccttccgcttccaccccgaacacttcctggatgcccagggcnnnnnnnnnnnnnnnnnnnnnnnnnnnnnnnnnnnnnnnnnngcctgtggggagcccggctccctgtccccttccgtggagtcttgcaggggtatcacccaggagccaggctcactgacgcccctcccctccccacaggccgccgtgcatgcctcggggagcccctggcccgcatggagctcttcctcttcttcacctccctgctgcagcacttcagcttctcggtgcccactggacagccccggcccagccaccatggtgtctttgctttcctggtgagcccatccccctatgagctttgtgctgtgccccgctagaatggggtacctagtccccagcctgctccctagccagaggctctaatgtacaataaagcaatgtggtagttccaactcgggtcccctgctcacgccctcgttgggatcatcctc

SEQ ID NO: 111 - DNA, 361 bp, Homo sapiens
tgactcttgcaaggtcatacctgggtgacgcatccaaactgagttcctccatcacagaaggtgtgacccccacccccgccccacgatcaggaggctgggtctcctccttccacctgctcactcctggtagccccgggggtcgtccaaggttcaaataggactaggacctgtagtctggggkgatcctggcttgacaagaggccctgaccctccctctgcagttgcggcgccgcttcggggacgtgttcagcctgcagctggcctggacgccggtggtcgtgctcaatgggctggcggccgtgcgcgaggcgctggtgacccacggcgaggacaccgccgaccgcccgcctgtgcccatcac

SEQ ID NO: 112 - DNA, 401 bp, Homo sapiens
cgcgctatgggcccgcgtggcgcgagcagaggcgcttctccgtgtccaccttgcgcaacttgggcctgggcaagaagtcgctggagcagtgggtgaccgaggaggccgcctgcctttgtgccgccttcgccgaccaagccggtgggtgatgggcagaagggcacacagcgggaactgggaaggcgggggacggagaaggcraccccttacccgcatctcccacccccaggacgcccctttcgccccaacggtctcttggacaaagccgtgagcaacgtgatcgcctccctcacctgcgggcgccgcttcgagtacgacgaccctcgcttcctcaggctgctggacctagctcagggagggatcgaaggaggagtcgggcttcctgcgcgaggtgcggagca

SEQ ID NO: 113 - DNA, 401 bp, Homo sapiens
tgagtggaaaggtggtcagggtgggcagagacgaggtggggccaaaccccgccccaggcaggggagcaatgtgggtgagcaaagagtgggccctgtgcccagctggaccgggctagggactgcgggagaccttgtggagcgccagggttggagtgggtggcggagggtggggccaaggccttcatggcaacgcccacgtgyccgtcccgcccccaggggtgttcctggcgcgctatgggcccgcgtggcgcgagcagaggcgcttctccgtgtccaccttgcgcaacttgggcctgggcaagaagtcgctggagcagtgggtgaccgaggaggccgcctgcctttgtgccgccttcgccgaccaagccggtgggtgatgggcagaagggcacacagcggga

SEQ ID NO: 114 - DNA, 312 bp, Homo sapiens; identical to SEQ ID NO: 75

SEQ ID NO: 115 - DNA, 275 bp, Homo sapiens; identical to SEQ ID NO: 44

SEQ ID NO: 116 - DNA, 401 bp, Homo sapiens
cttcagtccctcctgagctaggtccagcagcctgaggaagcgagggtcgtcgtactcgaagcggcgcccgcaggtgagggaggcgatcacgttgctcacggctttgtccaagaggccgttggggcgaaaggggcgtcctgggggtgggagatgcgggtaaggggttgccttctccgtcccccgccttcccagttcccgctktgtgcccttctgcccatcacccaccggcttggtcggcgaaggcggcacaaaggcaggcggcctcctcggtcacccactgctccagcgacttcttgcccaggcccaagttgcgcaaggtggacacggagaagcgcctctgctcgcgccacgcgggcccatagcgcgacaggatcacccctgggggcgggacgggcacgtgg

SEQ ID NO: 117 - DNA, 899 bp, Homo sapiens
tcaagcacctgcctctacaggtacctttcttgggaccaatttacaatctctgggatccccaactatagaacctggaagctagtggggacagaaagacggggagcctgggctaggtgtaggggtcctgagttccgggctttgctacccagctcttgacttctgtttcccgattttaaatgagcagtttggactaagccatttttaaggagagcgatggggagggcttcccccttagcacaagggcagccctggccctggctgaagcccaaccccaacctccaagactgtgagaggatggggactcatccctggaggaggtgcccctcctggtattgataaagaatgccctggggagggggcatcacaggctatttgaaccagccctgggaccttggccacctcagtgtcactgggtagggggaactcctggtcccttgggtatatggaaggtatcagcagaaagccagcactggcagggactctttggtacaatacccagcatgcatgctgtgccaggggctgacaagggtgctgtccttggcttccccattttggagtggtcacttgcctctactccagccccagaagtggaaactgagatgatgtgtggaggagagagccagcgttcatgttgggaatcttgaggctcctttccagctctcagattctgtgatgctcaaagggtgagctctgtgggcmcaggacgcatggtagatggagcttagtctttctggtatccagctgggagccaagcacagaacacgcatcagtgtttatcaaatgactgaggaaatgaatgaatgaatgtctccatctcaaccctcagcctggtccctccttttttccctgcagttggtacagatggcattgtcccagtctgttcccttctcggccacaga

SEQ ID NO: 118 - DNA, 350 bp, Homo sapiens
cttcctctcacatacataccgattcctttaactaaattacagttagraagttctacgggttgtacctctcggagagcattaagtcgtgttctgtgggggagaaagaaataaaacacacacaaaactattcagaaattataataagttgcaaaggtaggcagtccacaaaagttctccttcactrtactttgcctgagtttcaactccagagtttttcctgcaatttttccaggcaaggccagggcaagacaagtggggamctctgggtacaatatttagtttttatttagcagaggtggataggtacacataagagatacataatatcctctctagggctctgtgtactt

SEQ ID NO: 119 - DNA, 350 bp, Homo sapiens
cctgtgtcactttaggttcttctgttagaatgttctggattcgaagcacctgtggaagaaataacattgggttaatatttttgttaagtcacttaaaacaaccttatgcataatagggtcatcctccataagaagccatataatcttatacaatgagataaatcctattttgttccaaaattacacttaacacmccygtttcttcatttgggaacaggtgggtactgatctcaagtgatctttagcagaggtggagagtatctagacctacagggatgaggcaggaaatgcaaatgagcagcgcatcctggatgtgggacattagggagcagtggggatttcagtaaatg

SEQ ID NO: 120 - DNA, 392 bp, Homo sapiens
atgtgtaaaaagaacaaataaacctgtttaagatgggcatagctaataaatacataaactataatcatttaaagaaagataagaatgagttattcatcaagcttataatttggtcttgttaacttttaaagaagaattaatttaggtgctttgccagagagacggtgatcaagttcagaggaaagagaactgggaaaaacrtttctgctgcttcatgtttcagtgcttttataaaatcatagatattttactacatatagtaacatgttactcacctaacatcctcaagagagtattctacataagtgcatcctctagataaatataacttattggaagcatcaaaattttatctatcattcttgtgactaaatgtttatcaatgtttctaa

SEQ ID NO: 121 - DNA, 401 bp, Homo sapiens; identical to SEQ ID NO: 34
  misc_feature (286)..(330): n is a, c, g, or t

SEQ ID NO: 122 - DNA, 121 bp, Homo sapiens; identical to SEQ ID NO: 38

SEQ ID NO: 123 - DNA, 401 bp, Homo sapiens
taacaatggtattgatgagacactgagggagtttcagagacacgacactgttaacagtgagactaggggaagcggggaggaggaggctgtgggcaaacggccatcacaaggcaggactcacccttctctgcctattaaaagaagcacaaaatgtacttgagtggaaggataccagcaacactgactaattcggggaccagycttcatacaatctcaattatccagagctcaactgcaaaaaccggtgttaagttgggaagaccgtgtctgcccagtaaagaaggcacccccagtgctcatcagtgatgcctacaggagggaaatagtgccctgttagaagctggggctccagcactgggtgtgaaaagtatggagttggttgtatgatcttcccacaacaa

SEQ ID NO: 124 - DNA, 619 bp, Homo sapiens; identical to SEQ ID NO: 76

SEQ ID NO: 125 - DNA, 47147 bp, Homo sapiens
attcagccggtgcgcgcggcggcgggaggcagtggctggggagtcccgtcgacgctctgttccgagagcgtgccccggaccgccagctcagaacaggggcagccgtgtagccgaacggaagctgggagcagccgggactggtggcccgcgcccgagctccgcaggcgggaagcaccctggatttaggaagtcccgggagcagcgcggcggcacctccctcacccaaggggccgcggcgacggtcacggggcgcggcgccaccgtgagcgacccaggccaggattctaaatagacggcccaggctcctcctccgcccgggccgcctcacctgcgggcattgccgcgccgcctccgccggtgtagacggcacctgcgccgccttgctcgcgggtctccgcccctcgcccaccctcactgcgccaggcccaggcagctcacctgtactggcgcgggctgcggaagcctgcgtgagccgaggcgttgaggcgcggcgcccacgccactgtcccgagaggacgcaggtggagcgggcgcggcttcgcggaacccggcgccggccgccgcagtggtcccagcctacaccgggttccggggacccggccgccagtgcccggggagtagccgccgccgtcggctgggcaccatgaacagcagcagcgccaacatcacctacgccagtcgcaagcggcggaagccggtgcagaaaacgtgagtgtcccgagcgcgtcctcatcgcgggggctgggcgctcaggcacgcgggtgcgggaggcagccccaccccgcccccaaatccctgcgatcctgggattaggtccattcccggcactgcccgtggaatcgaggtttggaggccggctgggagacagaggacttggattctcccgttttcaatgattgcattttaaaaattgtcctcccacccatcctcttcccccgcaccagtgcatacacaccctctcacatttgcaactttgttctttctgatttggtcctgatttgttgacagctctgatctgccttgggctaatggattagttagtataaacctgtcttgaaatctccttccacttttcatatccgcatgggttaggttagaggacggtcttaattctcattcttcgtagagtttggtaaggcgagatgttttaaagagctaaacacatgctgacttttacgaaggggctgagtgcctctaaaggtactttttggtccccaccaactggctttgtgttgcgctcatatttacttatttggcagcaattttgtagcgctcatcgtgaccatatcggtaaagtggatagaagtggtagcaggtgggagtggatgcaacggacaggatacggtggaggatttgtattcttcagacatctttttcggaagcttgcttatcacttttggggtggctttagggtctgtaaaataaaagatttagaactgcatttgagagaggttttcattcttaacatctacctctaattcttttccccttcaaagttttcttctagttgagtgagtacaaacttgcttttgtcgttgtcggttgattttggtggaatatttgtgtgagatggccaattttttgtgtgtgtcagaaaaaactatccgtgctcaaaacatttcctgttgtgaggtggttgtattcatgtgtttattccaatttttttatttctagatctctgagttactttacctacatgtgtttcaagttttcgtaaacaattttaagaactcttaaacgtcttctcagaccaaatcagaagtgtgcattttgcttagactccaactatcactaatgggaaccagaaaaataacactttaagatttacatttaaaaccagttattggtttaaagtttcattctaaaattttagtttcctttcagaatttcagttatcatagttcttcagaagtatacttatgaattggcattaacagaggataataatctataaatagactgatgaaaatttggaagttttatggtacagtgtgtcttaagggaatattgtcaaaccagcagttttctaccttggcagtttgagacatcggttattaatacttttaattttgtagaatggtttcttatattaaagtatgtttgtcttatttgacattgtcattgatggttaaagttgggaggcatcccaaatgtctgttctatgtgtttattaatataataatacacttagcatcatatataataggggtgtcatgggttttatgtgtatggtgagaaaacatgaagatctccctgatgtgtttttaagatactgggtttcagttagggtgttatcaaaggacctggatggctttgtaaacaaaaacaaatgccataattttgtattcattacacagtttaacatttatggattttggttattttgcgtaaaatgtactttttattagattatcctaatattatacttacttagtttttaatatacttgtattaatttcttataatataacaaaagtattttttccattcacccacattttgttagcatagatgtttatcagatctctgctgagcaccgtatattgcttctaatcatacagatgccttaaatattaccagcttgctctgtaagaataggctagtgctggcattttcattatcaagtgaaagtgtttatataaattatttttacctgaatgaaaaattgttaactttataatgcagttaatcaaagtttattttagaaatgaagtcattaaacctagtattaaatttgagttttaaaattaaactaccagtttgtggcctaatgagccccaaaacatgccaacattggggaaaatagatcttgttttgagctgaaaatgctatccagacctacttaactttgacctcttaaatgagagccattttattttatttacagataaaatatgctgtagcattattataggactgtttaaaaagacagccaattaaatataaattttatggaatataagtattccataaaattttggagtaaagtaggtgacaattgtaacctgaagctctttcaatcttgagttgaatttattaagaaaaatcaaccccccctagtggcggctctcacattgaaaattatctttattagtaggaaatacattttaaatgtgttcaatttaatcccactgaagtatctccaacatagtagactctcaataaatatttcctttctttttggagtaatgaaggttgggaaattaaaggctctgaagcaactttacgtccaattcatgttcctaccttcaagaagaaaatatcaaagataactttcattatagaatctactataactttgcttagactgttgccccatacttagtgaccctactcagaaaaagagaacaaatcctgtgtttattttattctctttggaaatgaaagtgtttatttattttgtctcatgaagatagtcaaaaaggccattatataattaaatagaatgtttttccctagtgataattttgtatatatttttgtatttttaaggttttaatcataaagaaaaagttgtaatggatttcagcttacctgtacatagaaagttagcactgaatgttggcaaataataggtgttgagaaaaggggatctacactttaaaatgataccagctgtagtggtgattaagccattatgaagtgtcagaactggaagtcacttctgagccttagctgatctttctttaaaatgcatactgataaaaacttttacttttattaacatattaataatataaaagcattgtcttgctattctttttaaatgtcatgaatttcatatatgtaatactgaattgtattacttacataatactcattaaatgttttctataaatttatggtgccatttttaaaatagcatctaaaataaaagaatgggtcttttcatttacacaattatttctccatcatttttctttccaatagctttagatagcatatacatagtagttatggacacttgcttattagaactatgaaatgaagtaagtgaaagtgtttagttataggtaacattaaatggcaaaaagaggaaacaggtataaattgaaagcactggatctaaactaaaaaatgaggtctagtttcttcactgttacagatctgggcaagtttcttgaccaataaagcacgacagtcagcacctgtactgctactctcacaactaaaacagaacaaaaaaaaaatatatatatatatataaactgtgaagactgctaaagatacaaatgaaacagaaacgtaaattctattcttttagcttacattatcacagaacaatcaattcgcccgtgaaacagtaagaggcagtatacgattatgttctcaattacggctacggctgaaatgtgctacttcactggtgaataaatttacatagtacgtgcttactcatgtatttaattaagacagttacttagaaataaataccatacaaatcttttacaacagtacctttctacttttatgcttcttttaaaattgatattttgctagtggcttaatatgacaaaagatgactgtttattagcacttattctgatacaagcttgcccagttctttacatcattttcttcatttttataatagtactaaagaaaggtagtattatttaagtttatagatagggaactgagattcaaattcagagttgctcagataatgagaaagagtttggatattggatcccaggtctttttgcttcaaagcttgtgttcttactgacttgtgttcgtactgtccaggtgaacagattcagtgatgcatacagtacagccatatcctagggattttcactgtttcttctcagatagtgttatggctgaaataaattatttgtcatttcccatacataatttgtacttgctcatccccatacttgtgtttttacgtcctttcctcttagagtcttttctcctgtcttattgatttgctacccacctcccttcctctttaaaacattgtttttaaaggctgcataatactctgttgtactaatattctataatttttttaactgtttttcttttgggaggaaattttattcccaaccatttaatactttaatatttcagagaatacccttgggacgtgtaaattttaatgcaaatttatttttttaggaaaaaattcctgtaagggaattttgggatagaaaagtatgtgttgttttaaggttgaaccaaatcgtacactccaagagatagtatcaaattaagaaaaatttactaattacattccatcatcaatctggggatgtgactatatctttgcatttttgcttaaaaaatattattgtcaatttcataggcaaaagtgtggttggtaattaaagttatatgttgggatcatggttatgtataggagaagcacttgtatttgcagattttctacttagggtgtcctttacgtattcatttgttttgtcttacatttttcagtcatcttttagtttgttctttttacttctttctattgaaatattgttttaaaatgtattcctattaaataatactggcagattttaaaagtcaattatatatgtggcacatcttaagtatagcatgtgaggccttatcttttgatgtcttactgtggtagttagggattttagtgctgtcttgtctcactttaacctttttcaccttcctgcatcctcccaatatattttatcacaattttggattatatacacattagtgttgtattatttttgactgtatattgtttactgtttagctaagtaatatactgtgattatatttgccttcctgttctatgctattattgatttcttttctaccatcttcctgtttattagcatctgggtttagctgtcacttaggttcatcggagacagagtttgtgtttctggctcctgcttttcttgttttggtgtggttttctggaagagaagggtagttgcagaaagctagatattctgccgtcacagaaacagaagtgtcttgcctgtatttaagacccgatttagatgccacatctccatgaactcttttgcagcacctgtgttactgagcaatatattatgcttgattttgccatgttataaaatatatttcctcctagtaggaaaaagaatgtctttaaagataggactattatttgtctttgaaactaccagagcttcccagtacagtaccatgcacttagtacatatttgagatgtactaatttaacaattaactaccacttaaaatttttttggtaatgttttagtgattctggtaaggcagatacattttatgcgggttcgagggggaataaaaatgtgtgtttgcgtagaagaagggggaggggaaacaatgagttttccaggattatggaactagtagtggtttctaggccatatttcattttcctgatcttccctgctaatgtcttgtgctagaaactatgctgtttatatctcatcatctctcctcaggtatagcaaacaaaagggaaaggaaagaactcatcacaattatagggcagcagcaggagggtggcagaagacttctgactcattaaaagtggcttccagccagaattctcagaagtttttgtagatgtttttgactcatatagggaaataaaatatccagctgtgttcagcctgacaatgaagttggggtctatttgtgctatgtgtcacctccattacattaagcacatagtttatgattgtaaatatttgaaatttatattcagagataaatacggatgcactgaagctgggggaaggaaatgaagaatgaatggggttaagagttgggctttattgggtgtaggtagtatggtagggggattttattgaggaatacttcagatttcctagctgttagatggagagtagcaccatagtgctgagaagcgggtgcccaactccaggggaatgttgaatggaagggcacagggtcaggtacagggactggaaataaagataaacaagttatgggtaagtagaccaacgcagtaagagtagattaaatcaccccgaggaaaaatccgatagagcaaactcagtactgtgagaggcaatctcttgttaaaaaacgtcactttgatctcataggattactgaaaccatatctttgcatgtcattttgaggttttataatgaatattatataaaacagttatatttatgagtaaacttggttaattttttcagctttgcttcaaacactggctacaaatgatgaacctcatagacttttttgatggagatgttaaaaaggctttcaagatagcattcagactggcattgggcatactgttgggcctgttaccaccagcagttaaagcttgcagggcttctaaacagaagcatggcatgcagtcagctggagtcttgatttcataacaattttacagattgggacaagatttttgaggtaaaggtttcaaaaaataataagttactcctttgcctgaccaacatcatacggtctatttcaggagatgtttgaactccagagctcccaaatccaatcttacagggatgtttatttatatttcaaacaggcttttccttaaataatggttagcagtgtcctttcttaaagattcgaagacaatacaaaagtaaaaatattagcgtaatccaagtcaagtgcagttaatgtaagattactctatttttaattgttctgtatatcttcaagatgtatggatagatattaaatattttaacaaaatctgtacatttctcacaaaatcagtgaaaaagtgggtcaaatgcattacctttgttagctttaacaatctgacattttaaaagcttcaaatccagtacatctgaattgttaagttctgagggtacttcttagccctgaccttaattcctctgtgtatttgactttcttcctctgtgtatttgactttcttctatgacctccaaaatattctaccctggtttttttccgtctatcatttcttctctgtgtctatgcctcttccatagccctatacctaaatgttggtattactgaggtctatcctcaagccacttttttccttttctggtacagctctcattaggaaatgtagttgttcttctgagctacaaatcgcagaaccatttgcaacctctcctcactcaatggtttcctcttccttacttcctatagtgagttagtttagttcagtgaacatttgagtctggcttaaatctctcttcaagccagtcctttcttaacctcactgtcactgcctttggtcaggttgtgatcattccttttcttggcacttttggtcagcaaacattaattgagaatccactctattatgctgggcattaaggatacaaaaatgatttaagcttacatagaaataagggtgttaggcaaacaagtataagcaattatgttacttgacaatggaaatttgctctcatgttaaatattttgtaagacacatagtaatgcattagaaatgtagacaattttgcattatgaaaagcaagcctcagaatctagtgtgaggctgaatattgcaaagagccagcacaagacaggcagcagtaccacatggagggatacctttatgttactattagttctccctgtgtcatagcatgttgccttgtttcagcgtttgtgtcactctcttctctccagtgtttcataatcattactggaaagccaccaagagtgcaggactggattgtgtacacactttctatttctgtgaagttgtttgtatggaatattccttaatggaatcattatattagacatttgtataagaagtcaaatggggcagagttgctaatccattgtgaggtaggtcagggaggacttcatgaaagtgatctacttgagcggggacttgaaaccaatgggacataacaaggaggttgtatgaaagcactaaaccacatgttgtaactgtaagtaatttcttagctctggggtagaatagacaaaagcggcttcaatagaagaaatgaagccagaggggtaaatgaagctagaaagatcatgaaggattttgtgtgctaagctaaggaacatggacagttcagagctactgaaggagtttaatcagaggagtgacacagtcagatttatgttttagaaagaagttcctggcatcccggaatcctaacttcagcgaaccctgccctgctttctgtatactctatcaccagagtcagcttggtgaaacacaggctgatcttgtaaatctcagctcaacacttaagaacagatgcctaagtccgatttctatcgttactttgctgtctcctctatcttgaacatttttgcatcagacacccacatagctcacttcattttactcatgtctgtcctgaaacatcacatcagagagaccttcctaggctgtccaaaccagcatcacgtctgtcaccccttagtttcttaccttgctttatttttcttcttagcactcaccgccctaaaagttatatgtttatttgtttatttctccatcctccacctaggatgtaagctccatgacaacaggagcttttgtatattttgtttacctgtaagtgttctgtgctgggcacttgataggtgttcagcatttgttgaaagaatgtggccccaaccatccttcttcttttctctctttcaccctgtgcctctcccttcatgtgggggaattcttacagttcactaatccttagttatgcctcttcatgaaatcctgtccctcactcaagatccatctcagataccaccttttctgtaaaatcttttttcaagcagttgctgcttctgcttagctcccataacactttttgaatagttaggagaaaagtgtttacctgggctgtacaggatgtgatggatataaataaatacttgtcagcaagttattaattaaccagtagagaattacacaatgaggtagacaagcattataggtaaagtttgaaattcagttggttaagtggagaagtgaagtaattaggtgtgacttgaaatttgtttataaatgcaatatgattaggggaaaatagctaggggaaccatcaccaatttctattatatacacagttgtacagacaacctggagaaggtatctgttgatacatacataaacacacacacacacacacacacacacacacatcattttaccgatgtattaccttttttgtagaagtatttacttttcatcttctttctgcctaaagtattacttctccacatacatcactgaaaagaaattatctagaaatgttttgattgggtcatattaatagcactatgcccaggccaatttctactttacaaaagctgatataattccatttgaattgtcaaaaatgtctttgttgtaagaaaacgctagataattactcttctggctaacaggaaggtatagaggtataaggtataaattactttagtttcccagttcagcgtgggtatctgatgatttttaaattcactttaagtgattaatgtctgctgtgaaatcctggctggggtctttgtgtgaagttattcaacttttcttttctgaactcatgttcctctttgacccataagtgtctttattctcaggtgaaaatcatgctaaattgtttagggttccgttgaactttctaattgagacacaagctacgaaagctaataattaagtataattattgtctacatgtaaaagcaaaagttgctggtaatcaccattaacctctaatatttgccaacaagaaatgtaaatagcaaaagtcaaatttattcttcttttaatatttgaggaccacattagatggctggaggaccatctgcaggtgtcagaggggctttgggacattatctctaatgagttgaaagtaaataaatacagaaagctggtgatatgaagataaatactttatttagggttgtccttgtttattgacaacgtcaatgatgctgagatgcttcctgtggaagatagcaaaggaagtatgattttcatataatttatcacaaatttctctttttaattttccaccaaacaatggctaatgcatttgagaggggaaaaaaatcccagtagatctgttaattgggaatcactgtgctacaaatgcttgaagtataagcaaacattttcctatgatgagttcataagctttttaatgaaatattcggaagaatttaacccattccctgtttttcttaagatgtgaaaggaagattttagaaagacttacgtaaactttaagtagactttaaaagtttgttgtgttagagaaatatttgaggagatgttataatgcaatagaaatttttgctttatattttttaaaggattttttatggtattttgtttgtttttcagagtaaagccaatcccagctgaaggaatcaagtcaaatccttccaagcggcatagagaccgacttaatacagagttggaccgtttggctagcctgctgcctttcccacaagatgttattaataagttggacaaactttcagttcttaggctcagcgtcagttacctgagagccaagagcttctttgatggtaagacagaagggtttaatttgtctacaataacgtataaaaaatacttgtactagatatagctgtttctgtgttaataactacaaaaattagccgtatttggaaaatttattgctgtatagtaaaatttcagtggcaaagccagatttataagtcttaaaatcaattttccagttttattcacccaacagatgcagccactgaaatgatgcatggtatcattctttgaaaatcatatatttagaagttacactcaaattgattatgtcaaattccagtttcccttctacttcaatatttaaaagtcttttttaaaaaaaaagaaaagataaaacaccatcttgctggattttctgtgttttcatagacatgtcattttatttatccctccaaacttacgtatatttctaatctttttttttttttttgaggcagacttttgctcttgttgcccaggctcgagtgcaatgacacgatcttggctcactgcaacctctgactcccgggttcaagcgattctcctgcttcagcctcccaagtagctgggattataggcgcccaccaccacgcccagctaattttttgtatttttattagagatggggtttcactatattggccaggctgctctcaaactcctgacctcaggtgatctgcccgtctcagcctcccaaagtgctgggattacaggcatgagccactgcgcctggcctatttctaatattttacattaattgtataccgactgcaagaaatataattaaaacatgtttttcactagaaagaacatttgattgtaagagtcaatagaatttgatttcattctctattgtgtcactgaaaactgtttgtcattaaccaaaccaggtagcatccccgtatctcagttttctcagcagtaaaggttggggttttgagctaggcagctggatgatatttgttacctttaaattgcaatggaagtttttgtttgcaaatgatgtttcagtgtattttctcatgtaaaattaatttttgatttatcttttatctgtctataaggcagaaatagattttttaaggaaatggtctttttaaaatatcatataattttactaaccatagcaagttaatgataaaatctcagtgggctatgtcagtcaatgcttctcatacattaatgtgcttacaaatcacatagggatcttgttaagatgcagattcttgttcagtagctttaggtgtgtccctagattttgcatgtctaacaagctccgagatgatgctgatcctgctggtctaggtcactaggaagtgcctagacaacacgtttatggatatttgactggtaatttgtgtttagaatattgcaacagttaatttccctttagatttatgtttacataatctgatgtgtttcgtctgagcatctttttattgatttgcttgcttgctctcccgtctttcttttggacaaaagctatttagtttaacagttgtggtctgggcaatatacagatttgaggatagtgatttcaggaaagattatatatttcaaagtttcatagtacacaaattttctctgacctatataaaaagtgtttgaattttcagttgcctctataccaaacccttcatcttgggagaagagttacgcagtattcagtgatggtctgtaagtatgtgtgtattagctatagtcatttagctgacatagttggaactagaactcaggtttctagattccttatattgtttttcctgaccaaataatacctacttttttctgggaaccttcgcataggaaagcactgaggattttttcctagacctgtggttcttaaaagtgtagtatccagacaggcagcatcagcatcacctgggaacttgctagaaatgcaaattattgggtccaaccctagacctgtggaatctaaggtggtgggacctttggtgatagggctagatgcatattgaagtttaggagccactgctgtagattgtaacttcaggcctcctcccagcgtcacggaatgctgtcctgatccctagcatttactcacatgctgtgcttagtgcttgaccatgtggtggcagattctgtgatgtgtaagacgtggttgccacccttagagattctggagtctagaagccaaggaggcattattctctgactctgataaagctttattgacttgagtcattttacctttccatttcttgttcctttgtaatggggaatcaaattatatatgttaaaaagaaaaaaaaagtataggtttttcctctgtttagaagtagtacatatgtgtgtatctagacagatacatataaatgtgtgtgaaacacacatatataaacagatatatttctatatttaatgtctacattatgtgtgtatgtgtgttcatgtatgtatacacacagacacatacatgattagataagtgtcctattattcagtgcttcaagtaaaggagatctcacagtctatcttataaagcatgtcatagtttaacacagggttcatcacggaattgttaaaaacttttttctcagctcttcattaatgagtttgtctgttttttattctggttcagtgtatttgacagtaggatcttattacctatttgcatgattccttcatcaactacattatcattatctttaacgttagattcttttcaaactgcattgtgcataagaattacctagaaagctttttaaaatgcaaatttggaggcatgcccctgctgataacaaggaagttctgtgtaaaacccaagaatcagtattttaacaagcatgttacggagtctgaggcagtgatttagcctagccttgattatgccctgaacaagttaatttttgtttctttgccttcagaatgacaaatgcaaacatacaaaatttaaagaagtctatgaatatttttgcttgtgttatagtggtgtacattcagcctaagcagtttcttagattgtttgatacagaaacatacagttagatggaaaatgaaaataataaggttttttttttaatccccaaatttcctccagactaccagtggtctggaaaggcaatgcaacatttcagagcacacagagaatgaaattataagggtgacccttatgaactgaaaaaatggtagatgcaaacgaagagatttgaaacatgctaacaatgattaggatttttgtgtgcagttggacccactcttccactattagggaaacagtatagcgaagcgaagggaagctcaaagtgaataacaggatgcaaacagggggtgtgtaaattcctgcggaaagaacaatataaacgagtaatcatacaatcttgttagaaaggaaactcaagttttactgtaacaatagatatttttccaagaaaatacatctatttattgcaagtttaaataatccaacttggatggatcttcttaaagtttggaaccatgactatactgctgctgctgtctgaaaagcaacactataaagttttaagtactacattaatatttatccatttctaattaattaaaacatattgaaatataactttaaaatacttgaacaaggcttagcaatttttcagttataaagtcgaaaatagtttctttgacatgatttaagcattacatttaaatatattatctctgagatggagggtattttaaaaatttaaataacaatggttacaatcaataatagtttattaatagagactaggatttgggtggttacaatctaatctttgaaactggttgatgtgaagagaaaggattgtttcctcctatatcatgtctctcaaaattgttaaacagtgtacactgggcttgttgatcaatctaatcagcattgtaatgtttcattcctaatttcagcatatctttaatacaatttttaatgagatttccttactattttttgaaatgcccattattatgtaaatattttgttcaaattattctgtttttatacagctgccccaaaattgagaattcgggaatgactacttttgttttctgtttacatacaaacacctaatgagcctgacaaaatggagcttagggatccgagtttctgatttcaaagtcttgcatttgcagctgtcatagggaatagtagtattctagttatttttaaaacaaggtaatgttagggaaaatctaagtcttgaatcattatacatgcttaaaataatcaccattttataaaatgtagaattatttacatgttaaaatattttcattcattaagcctaaaaatgctgtgggaagagaggataatagttatattatgtgatgatctaacatttatttgaccccattgtttatcatggatctttcttgactttattttaaattaaaaattacaagtgctctgttcttggtcttccttttgcagatgctttaacagttcattcccagttcattaggttttccaaagagagctattgtgtttattcatcttcagcttgtgcatttctctgaatttcagttgttttggtatctctctagatcagaacattattcttgaaaaacaagtatacgtacatgtgtatatgcaaagaacaagcttgaacaagcagtaaaaatgaagtaatgcacttctaagtgttgatgttttataaaatctaatagatttgtatgtctgctttttcattcatgagaattctataatttcatctgctttgttgtaattttaaaatttctgtgtgtcaagtaatttaccaaagtttcagtatgatagtatcatagcaaatgttatttcttaattctaggactatccaaagtaggtttgtttgcataacagtttagcacatttgaaatcaccaaataaagtatttgttgaatttgatttacccatggcattatccatcttaaatggtgatttaactgttatcttttttcctaattcacattttaaaacatgaaactctaattacaatattcatgataactttcatagctaaaactatataaacctaggttcttttaaaattttaatttatggaacccctgcagatttaaacatgaataaatacaaagaatagtagcgcattcttattgaatgaatatacaaatcctggctctcatatttaatattgtgacctctttggttcaggaatttaatctctcttttcctcagatatcccaatttacagtataagatttattagattatatgaataaattaatatgatagaactttatataggatacttttatctctgcttttgtttgctttgacaactattttgaagaacacagtgacaaatatctgagattcaaacaatctaaactcattgtatcatatattatgtattttgctgctttcctgtctcttttaaatttactgatttaatggatttctctttgatcattacctagtcttgcatggttctagaatccttgcttatttggccatgaacaggtcattagtcatcattttttttctttttagggagactaccgtgggctaacattaaaatcaccaactttcagcaattttccttttttagaaaattttcaaatacagacatttaaaaatctgtagttaagtcttaagatatttcgtgagggtttgtgatctggttaatggaaatgtacaccttcatgttatagtgttttataaaacatattcatatataatattaattatattaaaatctgaagaaatttttatttggtaatatttgtatattatttttaaatcttgctcttacagccttttgacttttcaatcaatgaattttaatgagtaactcaaattcgtttatttgcttatggctggagatttagattttagagtcattttatcgtcagaataacattttaagccattaaagtgaataaaatattccagggggagaacatgtagaataagaggaaaagtaccaaagataagatgttttaaggatgagcaggggtagtaaaaagtgaaatctgtggagtatgaaagtatgctaaggtgatagagttgacttaagatactttcatttgatgtgttcttaaattggagagccagagagaaaactgtacatgaaagtgaaaactgaaatgaaatgaaagtgtaaactgaaatgaaatgaaagtgtaaactgaaatgcaatgaaagtgtgtacagaaaaataataacactagagaaggtgatttctgttccttgtttgtccatagaggccaaaaagccattcagttgttagcagtgggagattaagagggagacaaatgtctgggctctgtggctcatgcctgtaatcccagcattttgagaagccaaagcaggaggactgcttgaaagcaggagttcgagaccagccaggacaacgtagtgagacctcgtctccatacaaaataaaaaattagctgggcttggtggtgtacttctgtatcccagttattcgtgacactgaggtgggaagatatcttgagcccaggatgtcaaggctgcattgagccatgatcgtgccactgaacttcaggagtgagactgtttcacacacacacaaaagacggagacaagtagtctgatgggattggttgacataaagaaccttaatgaattgtacctactgaattcttcatgtattttctagcctgaaattttctcatacaattgtcatatttacagagcattctgttgtcagctggatttttttttatcgtgtctaatttctgtgttatggagacatttcatctctttatctcagcatggtagagggaggttgtgttttgtgattaaagcactgacagcaggagctgtggatgctagttcagttaacgaatcttgtgttttttgatagactttaacctcactgttccacagggtcttcatcttctcagcatgtttgataaagatgcttgcttgccctgatatattaggtttgtagtaaattctaaaaatgagagatctgtgaaaaatttttataattaaaattgttactgttatggaaatcatagttatttcctgcagaatcctgatatttcacttgttttagtggagaattttgtttttttttttttttttgaatatgcataagggcctttacggacctggtattaatatcaattgagaatccctttgtttaattaatttcatattttttatttagagatggaaatttgttaataaactgtttttccccttttgatataatacataataatttacttacatatactgttttcttttatcgaaagtggcacatattccaaatctggacacttggaaaagtgtgatagcttgctttggtgaggatagaaattttgggcattgtatgctacttgctttattgggatacatgtcaaattttctgttattgcgctatgtcttaagataggtgcttcagcttttgtgtttgtaaaattgttattatttcccgaagaagttcacaataataactgtgctgaacagcatggaatgataattttaagaagtatgagggaattcaatccagaacatacgtgagttatttcctaaatcctgaggttctaagtctctgtttctcaaagaatggcacctcattctcagcatcactggggaacttgttacctatgcaaactgtaaagccctatcctagacctactgaatcagaaattctagaggtgtggctaagcattgtattttaagccttccaggtgattctaatgtctgtgaaagcttaaggatcactgccctcattgagtatttacattatgttacttaaaatgcaatttaaatactactcttgtatatatgaaaagctaagtgcaactcattccccactgaaaaggtcaattaactgctcttgttccattaatgcagagatttgtcatatagttatagaggaattgtataaaactgagtgcgtaccaatgagtaactggaagaatgttaaacatctttggaagtcagtttttatgtaagagtttggatagaacaaacttttaaggactaccctgccaaagtagtaaaggggatggtaaatattatgaaattaattgaatttatagcagcagttagggactaaaaggggatatgctttccctggcaagatcatctttctgtttaaatgcaaactatagtaacaaaatacaaaatatagtttaccactattcggtattcctcatgaatttttttttccttgaccaattcaaagcatgtgatatgaagagatgtggcatttagggagtaggggaaatctgagcttagatgtctaaggaaggaaagtaccgtattaggaaacatggatatggttaaatgcatgtgggaataaaacttgagtcatctgtggtatgaccatttgataatgctgtgatgtatttgcactctaaattccatcatttgttagattaaattcttatttgtattgtacgactccttcatagatctttcaatgaggaaatagtggaaatattttggtggtttactatcttaacattctactgaatgttcagagtctgattctcacactttggaaagtggtacatatcctcactgatggggaagattttaacaaatgcccattacggtacagcagatacttcccagctggtgacctattttcagatactacattttgtttctgtggactgtcataaatttaattccagtggtgtaatatttaaagtgtcgttatgcatataatttatgtaacaatttacagttttgaagtatagttgacccttgaacaatgcattaataacatgaacagccgattaatgtgtcttttgtatatgtattatatactgtattcttaaagtaggccagagaaaagaaaatgttattaagaaaatcataaggaagagaaaatatatttactgttcattaagtggagtggatcatcatacaggtcttcatcctcattgtcttcatgttgagtaggctgaggaagggttggtcttgctggcttgggagtggcagaggcatgtaagtggacttgcatagttcaaacccatgttgttcaagggtcagctgtactttcaaatgtgtcatatagttaccatagtaatcctattagatactaattactgctttccacttaaagatgataaaaatactcagttacctccttaggggcactttaattgtaagtttctcatcatggtttgagggtgtataaagtcagcatagacttcgttacctctgtccttgattgtcagtgattgattccaggcattaccctggtattgtacatgttattttaatcctcacaagaatttgtctcaagaggtagcattgtcctcatttaaagatgaggaaactaaaggtcaaaggtagttagcaaagtgggcggtggctaataatagctcacacactgaggtctggctacctgagtttttgtctaagctctgccacttaaatctctatgactctgaacattttctcaatctccttaagtctcacctttctaatatattgaaataacagtgtcagtctcatagaactattatgaagattaaataggatataatacgtggaaagtgctaggtgtacagtgtgtgcccaatatcacatatgagtactaagtaaggtcactccaatggtaggaagcagctcttgtgacagtgtctcatgtcactttcttactcattgttttctttctaatcagcacaagcaatatatacatgaaaatgagtagtattgatagagcctctagtaatttactaagttagaggtagtaggcatgagagcaagaaatagaagaaaaacttcatgcaggggtagacattacatagtttaggctgaaaggccatgacataaaatgtttcctgaaaaagcacagcagtgtttttttaaatgattttaaaagtccacccttctcagactcatctttgcacaatatttacttcaattatttaccagtgattaaccttaaacacaagagcaacagaaatatttgcatatttgtttttggtagaaacctccagtgatcattccgccaaatgaacttgtcacttttcctacttatgtagtagttacacatattatctatcatccttccaacatttggaattataagcattgttgtttagaaagaatttgttctttttattttttctctacttcaagttcctgtaatactttaattaaaccctattctggtacttagtatttttgacattgttttctagttatttccatagcttatatcccctacttaaagacagggtctgactcaagtgtctaattacattggctaatactcccagtacaagcccaagaacaaattataaattactctaagatgaatggtctctttcattgcttagtcatcttctcagtgatcaagtagttatctcttaatatttatgtttttctactgccagtgactctaggtggaactaatatcaattgtgttgattaaatattaattttaagagattccaaacaataatttagatatataaagtctgacactgttattgtccgtttttaggcttatttcataatgtaagggtttggctttgttgttttctttttaaaagcaagtgttactgatgcttcataccagagcttttagaaaagtaacagaatatagttgactctgacgttgtatggttttagtgcattcaagcaaatgtggccattagtaagcaagcaacaacataacttaccgaatagaaagggagaaaaggccattctctcttctgccattctctctgtgtacagattaaacatttcctttggtcttgatgaactgttaggtcagtttacctcaaactgttttttggcctaaggaaatctgttctctggccttttgaagttacattcagagaccgtgcttttggctgtttcttgcaaagagatatgttttaacttctgcaaaggccagaatggcatgagattctggtgtgacacattcactgatgatttaccagaaaatacactgcaaatatgaaagactgcagacaggttttatatgtggaactctgctcagactgagagaaagtctagttattagtaaatctctagttttttcagagctggattattttgtcacataaaaatatagtgagataaatgttaagaggactgccagagtcagttttatttaatggtttctcttattcaaatatcacaggttaaaagaaggtcagaaagtggcaagtatctaaaagattatgctttataaccaagcaatccataagctctgagaaatatttctactaattacagctactgtttgttgaacagtattgatccactatgtgtcagaaactttacatatattctcattactcttcacaacagccctgcaagatgtgctttaaaatttttttttttaattaccacctcacatattaggagacaggctcaaataactcccacttttagtaaatgtcagaggtaaggtttgagcccaattctgtcagttaccaatatccacatgcttttaagtgagataatatttgaaagtgcttggcaaaatgtttaagtggtagctgttattatttctattcagctgcgcttcctcccagactataaatacatacataccacacacatacacacacacacacacacacacacagtgaggaaaaaaaagaagagatagcattataacatgacacctccaatagtaagcatcctatcatgccatcagactttccttcacatatataatccacaagcagttaaaagctataccggaaaagccactttacaagatgtaatacctaggagtaaatataaagatacctgtgcacatcttttttgtagacaactttaaaacattctagcaggacaaaatatagacttgaacaaatggaaagaaatgtatgttcttggatagaatgattcaagattataaagacattaattctccatgagttaatttataaatttaacatgaacctattaaatagtcacagtaattaacagtttttacccaaatgctggacaagaagattccaaacatcagaaatccatctctcaataaggtgtatagttgctttttttctcctcaccaccaccagttccctaatatttcaataaatacataaaaatgttggattcatttttataggttacattatggagaactttagtctcctaagaaaggaggtaggagtggagaggagtgtttgtaacagtgttgtgcagttctttgaaactcctaagttttgtgacaaaattatatcgtgaactcatcaaaaattatttttaacaatctgtcagctgacaacttgactaaacccttcagttttgttactagcatagaataaggagctacccactggcaacaggattacttacctagtatttattatttaccttgttttagccaaatactaaaaataccagtggatgccagtatttcaaattgtctttgtttggtgttcagaagttttctattatagctctttactcttgcttacttttaaaatcattgtttttcctttttttccatagttgcattaaaatcctcccctactgaaagaaacggaggccaggataactgtagagcagcaaatttcagagaaggcctgaacttacaagaaggagaattcttattacaggtaaattttagtaaatatagtttcttacactaaggacagttgtaaatggaaaatgaattaataagtcttttagtaattccctgtttacttaggatttgctcaatgttttttgccactttcatctgaactgcgatagtgaatgatgcttaatacatgaaaaactggaattatagtcatgcaccatataatgatgtttcagttaacaacagaccacatatgcgacagtggtcccgtaagattataccatattttttactgtaatttttctagtttagatacaaaaatgcttaccatgtgttaaaattgcctacagtattcagtatagtaacatgctgtacaggtctgtagccttggagcaataagttatactgtatagcgtaagtgtatggtagactataccatctaggtttgtgtaagtacactctatgatgtttgcatgatgatgaaaatcacctaaccacatatttctttgaatgtgtccctgttaagtaatgcatgactgtatatgaagtagattagttagaagaccggtcaaccccttctgttgtattaatatttcttcaaacagcaagaactcctagagtattttagaggttctaatttaagatgttgaatttatatatatttttatggaatgtatctctattaaaattgttaaatgcatttcttaaatagtttaaaatagttcttaacccaaatttcattttgccaatatgttataacttacattttattttagcaactgtttgtgacttattaacatactaaagattttctcaacaactccaatccctatttttatgcttcagaatttagtttctaatttgtctatgaaagcattttgcatctttttttactcttttttttagaattgatgccatgattgattctcacttaaaattctcagatacttattttgttgaaaaaagatagaataaagatgtgtgccatgtgtgctgtcaccgctatgtgatcattatcagtttcacccactgaactgactagaaaaacttcaccattgttacaaaaagtaaccctaagtttcggtaactccactagttcattcagtggatggtgatgtgcctaataatataacatttttattacaattgtgtaatcacattcaaagtcctgttagcaaaaattaacttatgttaaacaaagtaaatctattaaagcatgagtcctcccctagccccaactgaggatcttcatgtatatgtaaacccaaacataaagactccttattcaggtcataggaaagcattttaataattgctatttaagatgattaaacacacctcttgggttttctactaagggcctaatgaaatcccgtatttcaggtgaaatagacagatatgtactgattgacgtaacacttggcaagttggtttaaattatgggccatttttatttttttcccaaaacatttaggcaaattgtgtacataccctatgtcagggaaacagaataacaataatatgaatgcaaagctgtaaagctataattatatggaatatatatattttaaattatctgcaaattggtaacccttaagaagttaaaataaacttacctgtttatattgaataccatttgtagattgctcttttaataggaagactcacattctctatgattttcttaggattgtgcttatatgttatctttttatgaagaagatgactaaaaacattatagatatgtggaaatggctgtttgattataacaattgcataatgacatctgactttatattgcaaccgacggttatcagccaattaccactacagtgtgaaaggtgttaccagaggttctgtataccatatggcctaaaacttttgaggagaaatattttcctttgcttaacaaaggcatatgaagaaaatgttacaaaaatttttattaaaggccaggtgcggtggctcacgcctgtgatcccagcactttgggaggccaaggcgggcagatcacgaggtcaggagttcaagaccagcctggccaacatagggaaaccccatctctactaaaaatacaaaaaattagctgggtgtggtggcgggtgcctgtaatcctagatacccaggaggctgaggcccgagaatcgcttgaagccaggaggcagtagttgcagtgagcagagatcacaccactgcactccagcccgggtgacaatgcgagactccatctgaaaaaaaaaaaaaatttattaaaagtttaagacatctttctaggttagcttcaatttattactattttacaaggaataaaaatgaaacaatgtgaataactgtgtctttatttacttcacatgtttatttcataagtttaaaatatatctcttgctatttaatactgtattgttaaaatcttgcagctttgtttttcagtgacaggagttgaaattttatataacagtattgcagtttctctgaaataataagtgagcttaacaaaattttcagataggttgagtgaatctttgtgactaaaagaatgatgatctcttttatttaattagcatattaattccttctgttaatttattgagagaaatcaatacaagtaataaccttgggtctcctggtacttgagatcatttgagatatataaaaattgatgtgcatctatcgtttctagatttttatttctgataataacatttgtctaaagagatttgataactgtacttaaattatccttctgtcttctggcatgtacaccaatgagtttattggaatgtgactaaatttgtttcactgtttgaaaaagtatgatgttctacaaaataatatgaatgtgatcaatggataatcttccctagaagcagatattttcaggatgaatcagtgcaatgacggatatatagtgttactgccaagagaatttaagaatatccaattttgaatgtgttagtcattaactattcaagttcttatgggtagaatcaccattgtttatcctaagagaattgccaggtattacatatcatatttgcagtcaaaaacctgagagcctgcttgtggttaaagggacatggatggagccggaggccattatccttagcaagctaccacaggaacagaaaaaccaaataccacatgttctcccttataagtgagagctaaatgatgagaacacatggacacacagaggggaacaacacacactggggccgtttagaggctgcagggtgggaggagggagagaggatcaggaaaaataactgataagtactaggcttaatacctgggtgatgaaataatctgtacaacaaaccctcatgacacaagtttacctatgtaacaaacctgcacttgtaccactgaacttaaaagtaaaaaaatagaacaaaacagtcagaaccatgcaccaatttgggatcgataacacataaaggcagcatatcatgttatttaagtgagtacgctttggagccagactgaatttatctcctggatcagccattttctggctatgtgaccttgggcaagttacttttaaaggtatagtccttgacctcagtttcttctattgtaaaactggaacatggcacttacctcattgggtttttgggagaagaaaccactcaaatacataaaaacatttagaaaaaggaatactaaataatagttgttatctttgtagtcaagttcttagaagtataatatagatcaagaatcttgaaggtggaaagtaattggagtggaaagagagacagtcactgtatttcatttatttcatctgataatgaagatatcgactggactatatgtgagcagcataagcactagggcaaagacttgttaactcttaaatcccagtacttagcatacatatctcctcttgggtatgtaatagtttattacgtgttgaataaatgaatcactattatttatatagctctttatagttctcaaagcatggtgatataaatctttatttgctcatttctacaaccatataacattgtaccttattacactgagtgctggctctgtgccaagcattgagttaggtgggatatcgtcattatatctacctgatgaagtgccagtttttgaaataacactgaagcctaaaaagcagtaaatagcttaaccaaagccacacagctagtaatagacagagacaggagtccagaccaaatctgtctgactacacagtacaattcttaaactaaaccatactgtgtttctccttacatgaaaaacagggtgttagaagacattagctgtgatcacatagtaaagaatagatcaagtaccaaattgaactcaaggagaaaatagtgagggcttgtagaattaaaatatatgataataataaagtgatctatgatactattgttatccaagaggagaataaaggtattagttgatattggacttgaattatccagtaataggaaaagaaactataacatccaaactaaagagtatgggctaataaaaaataatggacccaaagtaggcaaaacagagagaaaaagaaacattatacatgtgaatgtgctgtgaacaaatagaaataacacatataaaatgataaatttaggtatgtgttcataatgacattaaattttagtggactaaattcactgtatgcttgctttacatgtgtattatagtttaattacatgtatattttatatatatagtgttttcctgtaaaagtcttaaaatgttctgtgacttaaaatgttagcatcagtgcttgaaatgtctttgtacaagaagagttttctattaatgttcccagtttaagaatctaatcaacatctttgcctcctgtttccctctaaaaaaaagcagtgtgatagactatagtgaatgatgtctagtttgttttttaaaaaatatatacaatatatttaaaagagaaaatctgaaacatgaagaagatgaattccatattctaccaaagttattctgattgagcattaaatttagccatttttccatagacaaatcaaaaggtatgaatagatatttcttagtccaggagtgtatgttttggctgtgtttgtgaaatgtgacaattttaactattttgaagagaagaattttcagagataaaagtaataacctttatctgatggtcaatattaagtcatattactaattttagaacttcctttccttgtaggctctgaatggctttgtattagttgtcactacagatgctttggtcttttatgcttcttctactatacaagattatctagggtttcagcaggtaagtatatattatttatatcatttatattattatatcatttactttttatatatatttaggacacagttggccatttgtatgtataaagtatcaatatatgctgtagaatacagtatgtatttgtagctaataattttttctaatattaataatttactgcactataattcctttaaacctttatgtgattcatggttactgtgtttcttctttcgcttatcaagaatcttatatataagaaactttcaggcacgtagggtctaggggagaagatacaaaattatttgctatcaaataacttatggatagcagaggatatatgacaactatgaaatgaatgagatgctgttaaaaagtacaagtaaaatcctatgatttatacctttaattctgatttatttggattatggaagttaccctaaatcaaatggtatgtaagctgacctaaataatgtgtaacaggtgggtggtcaagaaaacataggaatattgaagtactgtaagcattagactggaagtcattgaaggaaacagacgtgtctgacttgtttgatgttattgaatgaacagtgaatagatggaattataaatatttgatatattggaagggcaagaacatcttttatggtttgagaacagattgtaacatttgaatgcttgctattctcatatatctggttctcaaattgtactgtgcacaagaatcacctgaagaccttgataaaacttggtcatccctgtgagccccattgtcagatattctgaatcagtagttcacagtggggcccatgaatttgcatttctattaagctcacaaggctgctggtcttaataacagttatatagactagagcttcaactatattatatacccagtggaaaccactgaagggttttgttacagggggtgtgtatatttcaacttgtgtttcagatgcaacttttggaaattgtgtaatggttggcatcaagatgatttaatactagaagattaggttcctaggaagatttaagtgtagatgactaaagtagtggtatctagctactactgctaccacaaagtctaaactcctgatttcttgcattctaaagaaaatacattaatgtccatagaaaagcctgtttgaagcctaatgtattatataactgtcttaatcaggatttgatattgtgatttatattagtaagaaaatcagagagattagccattttccaatccatttttttctcgcatatacacatggatttttttcctaaaagaatattcatatctgacgcaagtggtagattaagacaccatttttaaaactgcaagttatgactcgctcatgggtatgcagtcgagacagtggatcactatcaaactgttttttagttgtttaggatagaataaaataatatagaatacacagtgttatctcatgtaataatggtaagtgttttgtgaaacttttccatgtgtttatgtctgtgcacacacctgtgacagatggaaatgtattttttatcataacttgcagttaaaaaaaaaggaaaactctggtttaagcactaaggactcagcaccgtagtaaatggtgagaggcaagagaaggaaagtgggtttaatatggtaaaggcacaatcccttgctcttgtggagtctacttggagtgaaaattttatatgaagaaaattttagagaacagtgaaggaaatacataaagaataccattaagcttagagaagtcaaagaggcctggggtggttaggaaaagctgcatggaagagataagaatctaaaaactaacaaatgaatatggaacataaacagattttaatatgttgcatttaaggaatggggatgtgacttatttgagcaagagcattcatgttgggaactgatgacaagtaacttttggcttatctgttgtagtgccagtctctttagctttttctaccttaggttctatcttaggtgactagggaattttaggaatcattcaattcgtattcatcaccactagcaagcacccactaatctaaataggctttaaaattaatttagccatattttttaatcagtccttttgttgtattccttgtatcttttttctttagtctgatgtcatacatcagagtgtatatgaacttatccataccgaagaccgagctgaatttcagcgtcagctacactgggcattaaatccttctcagtgtacagagtctggacaaggaattgaaggtaagaattgatggtacaaaaaatagtgttggtagtttttaaatatgagtctgtgaaaggaggctgggaacctgtagggtcatagaactccatgatagggaagtagtggaaagatgtaaagtctgcaatcataggccacagctaggtcacaaagagcctgatgagctaaggaatattttggcaaatgagagccatttaatgagtttcaggcaacagagtattgccatagtcagtaatgtattttataaaaataagtagtaccttcatgaaagatggaaggaaggtacaaggttgatacctgagtgcatgtaaattattgtgtttaaaatgcaccaaagaaaaaagtaagctagcatatgcaagtataaaaatgcttttctcaatgcaaaaaatgtttttggaaatttgttaaagtgttaagaaaacaaaaatgcattagaaaatatgaaaattgttgacagtgatagctcaataaaaatttaaaaaattatgcaagttctatctgataaaagtgatatttaataaacttttagtttcttgtcattagctcttttgaaaatgatttttttgtattcagaacacagactccagtttagaaactaatacaaattttacctattcaagtgcttaattttacagcaaaatggaaagtaaattttgttttgcctttatttctacagaagccactggtctcccccagacagtagtctgttataacccagaccagattcctccagaaaactctcctttaatggagaggtgcttcatatgtcgtctaaggtgtctgctggataattcatctggttttctggtaaggtacaaaattttatgatactggcttttactattgttacaataaaagcttgaggcaaatttaatttagcaaaatataattcagcagagaactattcccaaatcaggcaaccctcagaaccagagagcttcagagagctcacttaaaaacatgggctggagcatttatgaacagaaaatgcaagtgaggtacagaaatggcttgattgattacagcttgggatttgccttatttgaagatgatctgattagttggccacctgtgactgactgagactcagctatttggttacaaaagtttaattctactgttaggctttccgttagcttatatagtaaatgaagttgcaattccttggtaaggacttaaggagcagaggcatcttcagcccaaatttagtttaacattaagttatagaaaaaacaagccaattttctttggttatctttgatttcagctttaaaaatctgctaccaaataatttgataaaggaaagtaacattttaaagtaattatttctgattttgactatcttctataactcagaaaactgttctttaggatatagtaacaaaaattgagtgaaataacacgaagccttgtattttgactattttaggatttttaaggtatgagagaattatgtagcccttttttaataggaggatgcttaccatcttgggattgaatgcctgctagacagagaaattatggcctttccatatgtctcaaataactgccacatagaaaaacgattgtatattcatgattgtggaatcatcatttgataggagatgctgttttcttgttacaaagtctgaacacctgcataggagttgactgtagggaacagcttaggattcctcagagtggacttgtctgttatctcattgtatccttagctcatgttaccaagtacaggagaagaaaatacaaagtatattgtatattctttttgtgaataacaaggaatttgaaacagataatcaaatcttaaattaacattaccaagcaatgatttttgtttatgtgtttatttctgaagaggattttgctgacccagaattagaattatgctttgagacagttttcccagtgttattgctcatgaacaattagtatgtagagtcatgtcctgcataatgatgctttggtcaataacagaccatgtatatgatggtagtcccatgagatcataatggagccgaaaaatccctatcacttaatgatgtcatagcattgctcacatgttgatggtgatgctgatggaagcaaacctgtgttgccagtcatataaaaagtatagcacatacaattatatatgatacataatacttgaaaataaaacaataataaatcactatgtatttactattaatcattattttactttatttttaaatgtattatacttttaattattttattttaatcattattttagaataaggttaactgtaaaacaggctcaggcaggtccttcaggaaatattccaaaagaaggcattgttatcacaggagatgacagctccatgcatgttattgcccccgcagaccttccagtgggacaagatgtagaggtggaagataggatcattaatgatcctcaccctgtacagacctaagctaatgtgtgggtttgtgtcttagtttttaacaaaaaaagtttaaaaagtaaaaaaattaaaaattaaaaaatagaagaaagcttatagaataaggatataaagaaagaaaatgtttttgtatggctgtacactgtgtttaagtgttattacagaagagtcaaaagttaaaaatgcaaaagtttatgaagtaaaaatgttacagtaaactgtgctgggattacaggcataagccactgcacctggccaaaaggaaaatattttttataaattcagcgtagcctaagtgtatagtgtttataaactctatagtagtgtacggtaatgtctcaggccttcacattcactcaccactcactcactgactaaaccaaagcaactttcagtcctgcctaccttgtttacaataagtgctcttatacaggtataccattttttgtcttttatactgtatttttactgtatattttctatgtttagatacacaaatacttaccatcatgttacaattgctttaagtattcagtacgatagcatgctgtacaggtttgtagcctaggaacaaaaggctatactgtatagcttagatgcgtagtaagctataccatctaggtttgtgaacctaccctctgatgttcacaggataatgaaattgcctaaggacacatttcacagaacatgccccttttgttaaatgacatgtgagtgtatgtctgaggtggaatatctgtgtgcaggagggccttttcctccttgtgctgctattattttgatgtcagaaccatcccttggactggttgatattgttttaagcaattaaatatatcatgttcatgtttaagtgcctttgttttccctgtcttctaaatttcttccatatctttactcagtagggctctgcattctttatatgttttcatgatgattcattttagtgtcttaataaaattatattttgcctctatagaaaagattatgaactatgcagtatgctatgagctgtgatatagttcatgtatgcttgaaaatgaatgtttactttaggactttatcaccattcaggatatattgattgcctggtgtgcaaggagctgtgtgaggtgaaaatgatagggtaatggcaagcttggaaaatgatataggttttcatgttatgaccattaggaacaaggagtggttcacttatccctttagaatatttttcatattactctttgagatagatttaatgggcgtcccatggagagaggagtgaaggaaactaacagttctcagcttcaggaatatttatggaattatcaagaaccctagaggcagccataatggagccttttaaaaaggcactattttatattgttaattttaatgaacttttttgttgttgttgcttttttaaggcaatgaatttccaagggaagttaaagtatcttcatggacagaaaaagaaagggaaagatggatcaatacttccacctcagttggctttgtttgcgatagctactccacttcagccaccatccatacttgaaatccggaccaaaaattttatctttagaaccaaacacaaactagacttcacacctattggttgtgatgccaagtaagtgagactttttcacttttattttattggatgtacattatgtttcagtaagtctctcttagcatgtaaaacatacagtgtatgtaatattgtttattattagattggctattatcgtacattcttccagtgtagccttttacagtaaaataatttaatcaggctcacaaatcatctttttaatttttgcaatacttgtctcaaatgatgatgttcttatatattagtaaggtttattcttctgatgacatttatgttggtttgttttacatttttaaatggcacaaatgttatttgatttctagccccagaagttttagtaactttcagaaaattgtgagcaggagtctgatattaaacatttatatcatatcaaacatatcagtgcttttctcctttctaatgtgggaatgcagagaggtaattagaaaaaccttcttccctaaaaatagattataaaaacattccagatttttattaaagatgttctgttacccatacatctgctctattagattcatttttagcatactaatttccatggatttattcaggaaaagaaaataggctgaaactgaaatttgcaatcataagcaaagaagatcagtttacatggatgtgtttaatttcacatctacttatgtgaaattctaaatgtgaactaaaacatattgcagaaactagcgtaaaaccaatgaatttatcttggttatttcatttatgttaaatcttaatccattcttattttacctttttttattttaaacagaggaagaattgttttaggatatactgaagcagagctgtgcacgagaggctcaggttatcagtttattcatgcagctgatatgctttattgtgccgagtcccatatccgaagtaagttgtagttccttatgaacatgtcagaagaaaacggcatatactgttgtacatgtttcaaattcttacgtaatgtaaagtgtttaagtaaagtatatggataaacttctacttagtaacatatcattatgattaaccagggttacactctttgttcattaacttgtctacacctgccatgtagaaatattgttgtttagttattaaaaaatgaccattttggcccatgaagttttgcttgggaattttttaattacatcgttatcaattcataaatctatgttaatattgtaacaataatagtgttaataattctagtttaaaattataaagtattaggctgtaggaaaatattccctatttaaaatgaaaataattttttccccaacttatgttctctctatactttcctgtgttactagaattgtttggtacataatcttccctttaacatttaaaataataaatttaaaacaactctgaaaaactatttccatgccttttattattttttgtttaaaatttattgtctttggggataaaggaaatacatccagaactatgtcacaagagctttgttttaggaataatctttactatattgatttgggggtttgataatttaattttttaattttattttagtgattaagactggagaaagtggcatgatagttttccggcttcttacaaaaaacaaccgatggacttgggtccagtctaatgcacgcctgctttataaaaatggaagaccagattatatcattgtaactcagagaccactaacgtaagcacaaataatgtttcctgttttaacagttttgttttcataagtcctcttatgtgaaagcataaaaataattcaagcagactttagtctgtaaataaaaattgaaaagtttaattcatctagaaagaagagcacaggtgagagacattgagaagatagaattgacgaacttgattgagagctacatgtgcagagctatagaaagaataataaaactctagggttttatcttgggcatatgaaagacacatgaaaagctagtgtcattggtaaaaaagaagaaaaatataacaatgctttatttagaatatattctctaaacccagcagtgattttaagagtttcttacacatgctgcagatgagtcctttatcaaatatttgtattgcaaatgtttcctcccactctggagaattgatttttgtctgtagcttgaggtaaggattgattccccccagccattatacgtatacccaattgaccagtaacattgaaaagatgatttaccgagaaggtcattgtttcccggctgcgctgtattttgatcaggggattttgtctgtggttctctgtctggattgtgttgttctattaatagctccattagtgcagttgtctattttgtctagcattacactgtcttagttattctatctttattatatatttctatgtcagagtgtgtcattttgtttgttttgccttttttgttctccttcaagattgccttggttcttctttgccctctataattccatatacattttagaaagcagttgtctgaaaatctgttgagattttgagtgcaattaccttgaaactgtagatcatttggggagaattaacatctttttaatactgaatctttgagcccatgaacatgatgaatgtatgtatgtgtataagtacccatggaagtacatgagtatgtgtgtaccatatgtatatgagtgcatgggtatgtgtgtacctctacaaatttgtcacttctcccttgatcaatgtttctagaaggcactttttttaattagattttattagtctttattaggatccaacttttggtttattgatttttttctattttatacatttgttttcaattttaattatgtctgctcattattattttcttccttctactttctttgggtataatttatcattttttgcaacttttaaaaaatatatacttaaacatatatatcagtttccctttaagtacagcattacaaccctcatcttttgctatcttatttttattatttaattgaaaatactggctaatttgtttttatttttattcatgaattatttagaaatacagtgttactgtactttttggtgtttggggatttttctagttgcctttttatgattgacttttagcttaattccattgtagtcagaaaatattctctggatggatttcagtttttttgaaatttgtggtgacttattttatgatctaatacatggtctatgttggtaaaatatcccatgtaatcctatgaagaatacatgttctgtagtttgggagtatcttatttttatatatcagaagtctagtttgttaattgtgttcatatttgtatacatttgttgatattttatgtgcttctgttagttactaagacattttgttttcatttattactgaaggggggcatctttttacatctttctgttttttttttttttttgagatggagtctcgctctgtcgcccaggctggagtgcagtggcgggatctcggctcactgcaagctccgccacccgggttcacgccattctcctgcctcagcctcccaagtagctgggactacaggcgcccgccactacgcccggctaatttttttgtatttttagtagagatggggtttcaccgttttagccaggatggtctcaatctcctgacctcgtgatccgcccgcctcagcctcccaaagtgctgggattacaggcgtgagccaccgcgcccggccctttttacgtttttctatgacatttttcttttataaattacatttgtatcatttacctgtttttctgttgagttgtttgcctctctctcagactctattggagctctttattatggatatgaaattttataagtatattaaattataaatacattatgttacaaatattttctttaaaaattctattgcccgaggcgggcggatcacgaggtcaggagatcgagaccatcctggctaacacggtgaaaccccgtctctactaaaaatacaaaaaattagccgggcgttgtagcgggcgcctgtagtcccagctactcgggaggctgaggcaggagaatggcgtgaacccgggaggcggagcttgcagtgagccgagatcgcgccactgcactccagcctgggcgacagagcgagactccgtctcaaaaaaaaaaaaaaaaatctattgcaaaaatacaaatactttaatattaagtaattttcatattattatgccaatctgtctttatagctgctgggttttattatagaggttagttgtttcagattcttaactttctaattcctaatttttttatttttttattattattatttttgagacaggatcttactctgtcacctatgctggaatgcagtggcacaaatgtggctcactgaagccttaacctccaggctcaggcagtcctcctgcctcagactccagagtagctgaagactgtaggcatgtgccaccatgcccagctagtttttatttttttgtagaggtgagggtcttgccatgttgcccaggtttgtctcaaaatcctgggctcaagcaattcacacacatcagcctcccaaagtgctgcaattacaggcatgcaccaccatgcctggcccctaaattctcgtagtctgtttttatgtgtagatatttattccacacaaatttattatttttttctttttttgcagggtgtcaggtagggatgtaacctgaccatggaattaactaagttattttttaaaaattaaatcatttaaatatgcttgtctgaaaaacaattttatagcaccagtcatgagaataattgaggtgaaaataaaatatgtccctttctgaattcaattacaatgtattttgctttatgtttttcttttttaaattatttttattttaaaatgtttgatagaatttttttctaagacttttttgtacacaattttagagatgaggaaggaacagagcatttacgaaaacgaaatacgaagttgccttttatgtttaccactggagaagctgtgttgtatgaggcaaccaacccttttcctgccataatggatcccttaccactaaggactaaaaatggcactagtggaaaagactctgctaccacatccactctaagcaaggactctctcaatcctagttccctcctggctgccatgatgcaacaagatgagtctatttatctctatcctgcttcaagtacttcaagtactgcaccttttgaaaacaactttttcaacgaatctatgaatgaatgcagaaattggcaagataatactgcaccgatgggaaatgatactatcctgaaacatgagcaaattgaccagcctcaggatgtgaactcatttgctggaggtcacccagggctctttcaagatagtaaaaacagtgacttgtacagcataatgaaaaacctaggcattgattttgaagacatcagacacatgcagaatgaaaaatttttcagaaatgatttttctggtgaggttgacttcagagacattgacttaacggatgaaatcctgacgtatgtccaagattctttaagtaagtctcccttcataccttcagattatcaacagcaacagtccttggctctgaactcaagctgtatggtacaggaacacctacatctagaacagcaacagcaacatcaccaaaagcaagtagtagtggagccacagcaacagctgtgtcagaagatgaagcacatgcaagttaatggcatgtttgaaaattggaactctaaccaattcgtgcctttcaattgtccacagcaagacccacaacaatataatgtctttacagacttacatgggatcagtcaagagttcccctacaaatctgaaatggattctatgccttatacacagaactttatttcctgtaatcagcctgtattaccacaacattccaaatgtacagagctggactaccctatggggagttttgaaccatccccataccccactacttctagtttagaagattttgtcacttgtttacaacttcctgaaaaccaaaagcatggattaaatccacagtcagccataataactcctcagacatgttatgctggggccgtgtcgatgtatcagtgccagccagaacctcagcacacccacgtgggtcagatgcagtacaatccagtactgccaggccaacaggcatttttaaacaaggtaagggtgttatcaaactgaattaaatctttcagtgattctttttaccttatagacatgttacacattttttatgtcagctgattttaatcggttatctacagcattcatggagacagcattttttattatatctgtgactaccttttttttttttacaagcctgtactttttccagtatgttactaatatatcattcacctgattcatgagggagaaagatatcaaggaatgaagcaacatgaatgtgtccttaatataagatgacctaaattaccaggtgaaattagtttttagaagtattttgtttaaaatagataatttggtttattctttctggattctttaaaaattatatggctatttaaaaattcaagctttaaaaaacgtattgcaatttttaagaataatttcttcaaagctctatttttttatatatgtttgaaattgagttaaactcaaatttaagtgtgctttcttacaatgcctctgaaaccctagattaattatatccctggaattcagtcctaggcacctccatgttctctagctattcctccacattacctcccctatcctcatctcatcctttaaggtagaatggctttcttttctggctttcttaaaagaggtaactcagctggctttctgtcatggaaatcaagcttgatagtgcatttttgttgtttaaatgtgtcatcagaatccgtctggcagtgagcacactttaaatctaaaaatgatcacttaaaaaaaaaaagttaacataatgtcagtaactgctgtctctggccactcaggaatacatcatgtttgcatttatgctttttccattagaaaatatttagttcattttaaagtatatttaagtttagttttaaagaatatcttgactaaaattaagctccttgacccctgtttactctgtattagagtataataattaaaagtatgacctgaagctttatctttaattgtattttctggctttttcatacattttgcttgtctaatcgtatatgagctttttaatagaaaaggacagtgaaaatttttcttattccttacatccttcaattatattaaaattgaataatattcagttatagtccgtctcacaaaattgctatgaaagtatattttactcttgagtaaagcaaattgtacagaagttaattctgtaaaattacattttgaataaggagttgcatgagtaccacataagttctttgcagtgttttcccctcactacttttcactgcttctttgtaaataaccaaataattctatagacctacatatgttccagagtacatgttattgagctaagacactcaatattgagccactgagtagctgttcagcacttgaaatgtggctagtccaaattgagatgtgctgtgtgaagtacacattggatttttggattttgaagacttggcttgaaaaaagaatgtaaaatatctcatcttttattattgatttcatgttgaaatgattagttttttcagtagccgcattacaaaagtaaaaagaaacaggtaaaattaactttagaaatgtattttatttaatctactgtagccaaaaatttaagttctgtatgtggctcacattatatttctattggattacactgctgtgtacagtatgtttaaagagaatggtgacatgaattgtgttatgagtaatgagaaaaaatcattttaaactcaccattatctggccaggtaatactaactttttatttaaagaatttacagtgttgccattcattgaagatacaggttatatgatttttactatagattttatatatgttttggaggatctgtgaagtaattaacattttgattactgaagccagttatgtaggctttacaaaggtagattttatttgaagcaattaaggatatgattttaatctgttttaaagtttccagaacgtccactaactaaaatataaaggctctgtaatctataaaactctacagagctatacatcttcatgtccttcctttttatttttcttttttctactagcagttatagaaaccagattcattgcagtgtaagaaaacaagacagagcattttcttttggtaacttgattctgtaattagaactatgctttcagtagtattcattaattaaaagtatattatgaataagaaatcggttaagaaaatcatacctgtggtgtaatattttaggaatatttagaaacatttagaaaatcagaagctgccttttttggaaaagttttgcattccagtgtaagattcctgaatataatcaattcattgatacctataacttcaaacctggtcaaagcaaacctacttatgatagagaatatttaactgtaatttgtgacttgtgctgtttgacccatcaattcctacctgacccaaaggcaatctgaaatgagacagctgcatcactcatctgtaccatgttcaaaatttcctgtcaaattaatggaaaaacaggttataaatgcaactaatacataatatgtcctcagtatgtcttcactgtgtgaaagatttaaaatttagcaacagtaaaggaacttgaagtttacaactctcaggggtaagattttaaaaatacatgttaatgttatttactggcttaagatacttggaagatctattccaataagttgcatcaccatttttgttttcagtttcagaatggagttttaaatgaaacatatccagctgaattaaataacataaataacactcagactaccacacatcttcagccacttcatcatccgtcagaagccagaccttttcctgatttgacatccagtggattcctgtaattccaagcccaattttgaccctggtttttggattaaattagtttgtgaaggattatggaaaaataaaactgtcactgttggacgtcagcaagttcacatggaggcattgatgcatgctattcacaattattccaaaccaaattttaatttttgcttttagaaaagggagtttaaaaatggtatcaaaattacatatactacagtcaagatagaaagggtgctgccacggagtggtgaggtaccgtctacatttcacattattctgggcaccacaaaatatacaaaactttatcagggaaactaagattcttttaaattagaaaatattctctatttgaattatttctgtcacagtaaaaataaaatactttgagttttgagctactggattcttattagttccccaaatacaaagttagagaactaaactagtttttcctatcatgttaacctctgcttttatctcagatgttaaaataaatggtttggtgctttttataaaaagataatctcagtgctttcctccttcactgtttcatctaagtgcctcacatttttttctacctataacactctaggatgtatattttatataaagtattctttttcttttttaaattaatatctttctgcacacaaatattatttgtgtttcctaaatccaaccattttcattaattcaggcatattttaactccactgcttacctactttcttcaggtaaagggcaaataatgatcgaaaaaataattatttattacataatttagttgtttctagactataaatgttgctatgtgccttatgttgaaaaaatttaaaagtaaaatgtctttccaaattatttcttaattattataaaaatattaagacaatagcacttaaattcctcaacagtgttttcagaagaaataaatataccactctttacctttattgatatctccatgatgatagttgaatgttgcaatgtgaaaaatctgctgttaactgcaaccttgtttattaaattgcaagaagctttatttctagctttttaattaagcaaagcacccatttcaatgtgtataaattgtctttaaaaactgttttagacctataatccttgataatatattgtgttgactttataaatttcgcttcttagaacagtggaaactatgtgtttttctcatatttgaggagtgttaagattgcagatagcaaggtttggtgcaaagtattgtaatgagtgaattgaatggtgcattgtatagatataatgaacaaaattatttgtaagatatttgcagtttttcattttaaaaagtccataccttatatatgcacttaatttgttggggctttacatactttatcaatgtgtctttctaagaaatcaagtaatgaatccaactgcttaaagttggtattaataaaaagacaaccacatagttcgtttaccttcaaactttaggtttttttaatgatatactgatcttcattaccaataggcaaattaatcaccctaccaactttactgtcctaacatggtttaaaagaaaaaatgacaccatcttttattcttttttttttttttttttgagagagagtcttactctgccgcccaaactggagtgcagtggcacaatcttggctcactgcaacctctacctcctgggttcaagtgattctcttgcctcagcctcccgagttgctgggattacaggcatgtgccaccatgcccagctaatttttgtatttttagtagaaacgggtttcaccatgttggccagactggtctcaaactcctgacctcaggtgagcctcccaccttggcctcccaaagtgctgggattacaggcgtgagccactgcattcagctcttcttttctttagatatgagagctgaagagcttagacacattttgcatgtattatttgaaaatctgatggaatcccaaactgagatgtattaaaatacaatttttggccgggtgcagtggctcacgcctgtaatcccagcacttggggagggcgaggagggtggatcacgaggtcaagagatggagaccatcctgaccaacatggtgaaaccctgtctctactaaaaatacagaaattagctgggcatggtggcgtgagcctgtagtcctagctactcaggaggctgaggcaggagaatagcctgaacctgggaatcggaggttgcagagccaagatcgccccactgcactccagcctggcaatagaccgagactccgtctccaaaaaaaaaaaaaatacaatttttatttcttttactttttttagtaagttaatgtatataaaaatggcttcggacaaaatatctctgagttctgtgtattttcagtcaaaactttaaacctgtagaatcaatttaagtgttggaaaaaatttgtctgaaacatttcataatttgtttccagcatgaggtatctaaggatttagaccagaggtctagattaatactctatttttacatttaaaccttttattataagtcttacataaaccatttttgttactctcttccacatgttactggataaattgtttagtggaaaataggctttttaatcatgaatatgatgacaatcagttatacagttataaaattaaaagtttgaaaagcaatattgtatatttttatctatataaaataactaaaatgtatctaagaataataaaatcacgttaaacc

SEQ ID NO: 126 - DNA, 5988 bp, Homo sapiens
ctcaccctgaaggtgacagttccttggaaccttccctgatccttgtgatcccaggctccaagagtccacccttcccagctcagctcagtacctcaggtgagttgctgggggacttctggcttgccctttctctcccaataaaaggaacattttggtgcctccaggacttcttaggtagctacctgtctagcacctccaaaaagggaggctcagagtgtttttagtgaccaggcagtctagccccctagtggggaaactgaggccaggggaagaggaggacttgcccatggtcccacagctggtaccagacctctagatacagatggcatctcattcaggacttcaggacccaggctccagctccatcccctagtgagtgtctccctgcctaccctggggcttccccatcaaggccacctggcaggctggaatatgtgcagcccctccctcaggctttctgatgacaggggcttctccttgggtggacagggtggatggagggggtgggctgggttcttaccagctgtaccctgccctagcctaagaagctacccctggcagattttaccctcctaagggtggcttgtcagtgctgagatgtcctagacagctgggacaatagaggcagatctgtgcaggagtcccaggcctttcctatctcattgaccatcttctttgtcctttgctgggagacaatcagggtgacagattgccaactgcagggagctggaaataccagtccctaaaaactcaccagtcacatctcccttggcctcctaccatcttacaaaggctgcaggtccttgggatacccactgtgcagaaggggacaccatagcacaccaaagcctggcactgtcccctgttgactcagggatctagtgtgctttgatatttagcccctccaggaagcctccctccactataatacttgtggtaggaaccatccatctccctgtcttgtgaggttctcctgtggggagcctaactggtaagactgtcaggttccccacagcagatctgggttttctcttccctctggatccagctgggtactctgaactgagagatcttgtcttaccctctctcagatgttgaaattggaccccagaaaagtaaaatgtgcagtccaagatcactttgactagaatgttgggtctactgacctctagtccagggtaacaggcagagatgcctgatatgttggagagagtggtttatgaatttaaacaccctttttaggtcaagcttacagagaaagtattgcctcagtttcctttcagtttagatccattcctgatttccctgattccagtctggggttttcttacagcctagtgggaaccttccatttattctctgctctctggtaacctgcaaaagggggaggtccaaactgttcattcattgagaattgagccaaaaaaaaaccctggcctggatttctctgactaaagagctcaatctagctggtctccagctgcctttaaactgtggatcagttgaactcagagagctggggctgaaagcaatgtggtttgggaagtggccatcctgtcccctatctcttcctcagtctgtcctggggtctggtgggatttcctgcatcctgggattgagcagcagagaactgagggttctgggaaaattccttcattgatctgaccactcttcaaaaggaggtacatgtgacagcagctggaaatttccagggaagtgtccctaaggagtctgagtcctggctctgtcactgattgctgggggactttggacaagtcagcgctgcttcccccaaatgttaaatgaggctaaaggatcagatgatccctaattcccctgagaacatgattttcctaagtgtggtgggtaggactcggggtgatacaccttgattatgtgtttattttaatgtgttaggggaaaaatcaaacttgtactttcacatagatattgtttatgatgatatgtaggtagatttaaagttgattttaggaaaatgtgaagtaaataacagtactggtactatgtggaaatcacagattgacattggaagatgtcagtttagattggtacagcagttaagagaaagcgttctggaattaggcaacttggcttgggagtctgcatccaacactttctggctgtgtgaccttgggcaagttacttaccttctctgagcctcattgcaggctacttcatagatttgtggccagggctgaatgaagaaggactgtgaaattcttagcccacagtggtagttcaacaacttctccccacctcaccctcttcttcatgcccagtaagcagttctggtggaaaggtttcccctttccctgacactctagatattggcttttctcatcccccaatctgacggcttgactttttttcttcctgcaccttctctcagcagccacctccaagatccctacactgatcatgcttttcccaatctccatgtcggccacggagtttcttctggcctctgtcatcttctgtctggtattctgggtaatcagggcctcaagacctcaggtccccaaaggcctgaagaatccaccagggccatggggctggcctctgattgggcacatgctgaccctgggaaagaacccgcacctggcactgtcaaggatgagccagcagtatggggacgtgctgcagatccgaattggctccacacccgtggtggtgctgagcggcctggacaccatccggcaggccctggtgcggcagggcgatgatttcaagggccggcccgacctctacaccttcaccctcatcagtaatggtcagagcatgtccttcagcccagactctggaccagtgtgggctgcccgccggcgcctggcccagaatggcctgaaaagtttctccattgcctctgacccagcctcctcaacctcctgctacctggaagagcatgtgagcaaggaggctgaggtcctgataagcacgttgcaggagctgatggcagggcctgggcactttaacccctacaggtatgtggtggtatcagtgaccaatgtcatctgtgccatttgctttggccggcgctatgaccacaaccaccaagaactgcttagcctagtcaacctgaataataatttcggggaggtggttggctctggaaacccagctgacttcatccctattcttcgctacctacccaacccttccctgaatgccttcaaggacctgaatgagaagttctacagcttcatgcagaagatggtcaaggagcactacaaaacctttgagaaggtacagtctggggaaaggcaggtgggtggtgggaagcagatggcatcagggcctgggaggtcaaaggtaagaggaactgcatggggcttggcaagttctcaggaaggcttcaacctgggatcttgaagccagttgtggaatagtcttcttccttggcagggaaatagaactttatcttgactaacccttccatgcttccacagacagcaatagccactgaagagtcattacatgcaggaccctggggcagttgctgagggagccaggaagagttaaagagttcatctcctggcctcataatagaaagaagataaagagcacatccagatgataacagtacaagacgctgtgtgtcaaatgtcccatgagttggggctagcagcattctaaggtagtaggagagagccttgcagaggcagagagaagctgggacaacagcctcagggggcatcacctccagaacaaatgtgctaggaatagtgaaggaccagacctggatggagaggtagctctgggtttgagatcttgctcacctgtggactttccctacctaagggccacatccgggacatcacagacagcctgattgagcactgtcaggagaagcagctggatgagaacgccaatgtccagctgtcagatgagaagatcattaacatcgtcttggacctctttggagctggtatggttaccccattgtgtccttcctgtgctcaagtgccctgacctgctgctgcctgcctaacttcttctgttctaccctgtccagggtttgacacagtcacaactgctatctcctggagcctcatgtatttggtgatgaaccccagggtacagagaaagatccaagaggagctaggtaggtagtggctcccttcaaaggggtcagtgccaggggtctggccaggtctaggcagcccctgcatccatcttgtccctgtgttctgcagacacagtgattggcaggtcacggcggccccggctctctgacagatcccatctgccctatatggaggccttcatcctggagaccttccgacactcttccttcgtccccttcaccatcccccacaggtaaggccccatggagccactgctgtctgttactgatcttactccggaccacatacctgattagggttagtgggagggacacggcatgggagacagggagatttgcctgttgccctgagcctgactgagcttcctttctccctagcacaacaagagacacaagtttgaaaggcttttacatccccaaggggcgttgtgtctttgtaaaccagtggcagatcaaccatgaccagtaagttcagagatgcagaggaaaggctgggtccaccctcttaagctcttatatatgattaatacaatcattgcattgatcctcctgtccatgggctgcttgcctgtcctctatcctttggggctggagctccactcacttgacacttctgagccctgaactgccacttcagctgtctccctctggttacaggaagctatgggtcaacccatctgagttcctacctgaacggtttctcacccctgatggtgctatcgacaaggtgttaagtgagaaggtgattatctttggcatgggcaagcggaagtgtatcggtgagaccattgcccgctgggaggtctttctcttcctggctatcctgctgcaacgggtggaattcagcgtgccactgggcgtgaaggtggacatgacccccatctatgggctaaccatgaagcatgcctgctgtgagcacttccaaatgcagctgcgctcttaggtgcttgagagccctgaggcctagactctgtctacctggtctggttgggcagccagaccagcaggctggcctatgtggtctaaggttcagcctgaaactcatagacactgatctggctgcagttttgctatctgggctgtgggcaagcctaagggatcctgcctgcccctaccctggacttgcctctgcacaccctccagagacaacaggtaaaacagggccacatagatgctgatggagccttcccaagttgtgcttgagccaggaggcctgctagggttaggaggtccttaggcctctgagaagctctgaagaactctctggaagcccctgggcccagtacctagctggctctgtgagggtgctgactggcttcagcaagttagaactagccaaaccaggaccctgtccaatctttgacaattgggagctgccaagagtgaagggaagagacagcccaggatactggcacagaggtagtctcactgcttgaactaggctgagcaatctgaccctatgggtctaggacacagttcctgggaacatcacattcctctgcccttcctgcaggcaggaacaaacagggctgccttctggccttgtaagacccttattgctgtcctggaggggctggggacttgtgtctgcggggatcagagcgcacagggagtgcacatatccaggcaccaggactagggctggagtgaggggggggtatttcaattaccttctattggtctcccttctctacactcttgtaataaaatgtctatttttaatgtttgtacacaacaatccttctattctagcctgcattgagcttgcatgcttgcataagagcttaagaaccattgatttaatgtaatagggaaaattctaacccaggtatccaaaaatgtgtaagaacaactacctgagctaaataaagatattgttcaga

SEQ ID NO: 127 - DNA, 7758 bp, Homo sapiens
gaagctccacaccagccattacaaccctgccaatctcaagcacctgcctctacaggtacctttcttgggaccaatttacaatctctgggatccccaactatagaacctggaagctagtggggacagaaagacggggagcctgggctaggtgtaggggtcctgagttccgggctttgctacccagctcttgacttctgtttcccgattttaaatgagcagtttggactaagccatttttaaggagagcgatggggagggcttcccccttagcacaagggcagccctggccctggctgaagcccaaccccaacctccaagactgtgagaggatggggactcatccctggaggaggtgcccctcctggtattgataaagaatgccctggggagggggcatcacaggctatttgaaccagccctgggaccttggccacctcagtgtcactgggtagggggaactcctggtcccttgggtatatggaaggtatcagcagaaagccagcactggcagggactctttggtacaatacccagcatgcatgctgtgccaggggctgacaagggtgctgtccttggcttccccattttggagtggtcacttgcctctactccagccccagaagtggaaactgagatgatgtgtggaggagagagccagcgttcatgttgggaatcttgaggctcctttccagctctcagattctgtgatgctcaaagggtgagctctgtgggcccaggacgcatggtagatggagcttagtctttctggtatccagctgggagccaagcacagaacacgcatcagtgtttatcaaatgactgaggaaatgaatgaatgaatgtctccatctcaaccctcagcctggtccctccttttttccctgcagttggtacagatggcattgtcccagtctgttcccttctcggccacagagcttctcctggcctctgccatcttctgcctggtattctgggtgctcaagggtttgaggcctcgggtccccaaaggcctgaaaagtccaccagagccatggggctggcccttgctcgggcatgtgctgaccctggggaagaacccgcacctggcactgtcaaggatgagccagcgctacggggacgtcctgcagatccgcattggctccacgcccgtgctggtgctgagccgcctggacaccatccggcaggccctggtgcggcagggcgacgatttcaagggccggcctgacctctacacctccaccctcatcactgatggccagagcttgaccttcagcacagactctggaccggtgtgggctgcccgccggcgcctggcccagaatgccctcaacaccttctccatcgcctctgacccagcttcctcatcctcctgctacctggaggagcatgtgagcaaggaggctaaggccctgatcagcaggttgcaggagctgatggcagggcctgggcacttcgacccttacaatcaggtggtggtgtcagtggccaacgtcattggtgccatgtgcttcggacagcacttccctgagagtagcgatgagatgctcagcctcgtgaagaacactcatgagttcgtggagactgcctcctccgggaaccccctggacttcttccccatccttcgctacctgcctaaccctgccctgcagaggttcaaggccttcaaccagaggttcctgtggttcctgcagaaaacagtccaggagcactatcaggactttgacaaggtgagcccggggtgcaggtggcaaggggcaccttgcagggcctgggtgcagcccctccctcccagctccagcatgcccacacagctgctgtgttgccaaggcctaggaaggctctggacacctcagaccagctgtgtgacctggagccgactcttccccttctctgggcctcagtttcctcatccttgaagcccccttctcagggctcctcaaagcccccaagaaaaaagccctggaaatggggccctagcagagtcctgcaatgtggggggcctatgagtgagaaagctttcattctgcagaaacctaaaccccaacagaggctaatccccagctctggtgtcacgttgcttccctgtgttcacactaaccttttccttctttgaaattggacccctggtgttattgggaggaagggtcaatggggcataaaatgacactttaagccatacccagggctgctaccagctcctgctgcaagctgcaaccccctgcctagagaccaagttgggaggataggggggtacccagccaccaggtacaggccaggggagtggagcaacgttcagcctttgaccttggaagtgccagaggtgcccctaagcttgtgccccctcagaacagtgtccgggacatcacgggtgccctgttcaagcacagcaagaaggggcctagagccagcggcaacctcatcccacaggagaagattgtcaaccttgtcaatgacatctttggagcaggtaggaaccagaaccttgcccctccatccaacaatgcctgctgttcacccacagccttgcccagcccctcagtccatgaaataacccaccaaccctacaccagatggtacaacatactgagatctggcttgggatcagggtttgagcctgggctatgccaccaattcccagtggagaaacagcaaagtccttctcctcccctaggcttcagtttccccatctgaacaataaggtgttctctggcctgtaagtctaggcccctataattccagcagctaattctgaaacctgtatctcaagtttatgttgaagagacccagcctctgtcttcaggaaactcacaggctagggccagagaaagctaatgctggatacatacatagcagatacttgggaaatgatggtttccttgtttctgtcttccttctttcctcaccttacactacacggttcaggatttgacacagtcaccacagccatctcctggagcctcatgtaccttgtgaccaagcctgagatacagaggaagatccagaaggagctgggtacatgggggcccccaaccctatagccaggagaagccttgagacccaggttgtttgttcagtctacaaacacctgttatgtgcctgctgtgtgcaagccctgggcacacagtagtgcctgcccttgcctagaagatgtgggaggttagtggggtcgcagacttgtgaatagacagtcttacataagagtgacatggggtataagaggggataattcatggggcagttagggcagcccctgagctctgcttgtcctctgtgttctacagacactgtgattggcagggagcggcggccccggctctctgacagaccccagctgccctacttggaggccttcatcctggagaccttccgacactcctccttcttgcccttcaccatcccccacaggtgaggcctgccggttctgccctcccacctctaaagtgcttgccatgttttctcttcctggcttctcagccctggccctggctcagcatctccttcccgacctcgttccccacagatcccggcctcagtctgcccccatccagtccaaacataatctaacccccagctctcaggagaaagttccacttgtgatctcagcgctcattcccctctgttcatattccctccctcccagtgccctctgtgccagtcaggtcggcctcaccctcacaagcatgaccctattggcctccaatcttgctaacgctgaaccttctgcctggaataccttctagcctcttctctgaccaccagaatcctacccttgctcaaagtcaatgccgacacgagcttcctctccccagaagccttttgactcatccagctggcacagcttcattcctgatgtcttataggacttacagccatcagcccttgatcatgccctggaattttaacaatgtcaagagagttagtgagcatttacttctacccaaacgttgttctagttattcctgcagtaagaggcctgaatccccagccaggctagaaattccccggggctgccccaggctgcctgctgcttttttttttttttttttttttttcatagaaaatagaaaaacatttatctgaaattgcctgcttcttggctccagagaacagccaagtgcgcagccaggcgcaaagagaagtttagtaaatacttgctgaagttaaagaacaggacgcaaggaagagggaggatgtttctacctcttccctgttcctcccctcccctcccagtgtagggatggagatggcggtgggcaggctgtctggatggggtggaggtaggagcaacacatgccccagctttccagccctgagcctcacagtgccctcttccctcctcagcacaacaagggacacaacgctgaatggcttctacatccccaagaaatgctgtgtcttcgtaaaccagtggcaggtcaaccatgacccgtgagtacatacccctcacgaaaaaatgtgtgcaggttcagcagtcaggaaggctgtttgtccctgctaggaactgtttatataatgaaaggaggggacctcaattgctatagtctgctctaagtgacgatatttacaaaagtttcacaaactttagtgcacaggaatcaactaggatggccaggcgcagtggctcaagcctataatcccagcagtttgggaggccgaggcaggcagatcacttgaggtcaggagtttgagaccagcctgggcaacatggtgaaaccctatctctactaaaaatacaaaacaaaaattagccggacatggtggtgcgcctataatcccagctactccagaggctgaggcaggagaattgcttgaactctggaggtagaggctgcagtgagccgagatcgctccactgcactccagcctgggtgacggagtgagactctgcctcaaaaaaaaaaaaaaaaaatcaaccaagacgtttgttacaggtgatggttcccccaggattctactgtggtatctaaggtggggtacctcaggcgattctgatgtgaatggctcagagacctctctttggaaagccccactttagtgtataggtagggggaccatatatataatttaccatccacactgggacatttgagtgtgaaaatgctatcaatgtttatgctagtcatcattactccaaaacaataaacataagccaggacatactgttgaggccccttaggaggcatattttgagtaggatgaagaaacgtatgtctttctttcttcctttcactttaatttttaaatagagacaaggtcttcctatgtggtccaggctggttttgaactcctgggttcaagggatcttcctgcctcagcctcccaaagtgctagggttacgggtgtaagccaccaaacccagcctgtttttcttcttttaatttcttttagataaagcattatttaaagtaaattaatattaaaaggcactatctttaaggctggtcattttagagagagctttgtaaaagaaataagcatcaggccaggtgtggtgactcatgcctgtaaccccagcactttgggagtccgaggaaggtggatcgcttgagctcatgagtctgagaccagtgaaaccccgtctctgcaaaaaaaaaaaaaaaaaaaaatacaaaaattagccggatatggtgcctgtagtcccagctacacgggaggctcaggtgggtggttggcttgagctggggaggcagagagagtgcagtgagctgagatcgcaccactgtactccagcctgggtgataggagccggagggtgtctcaaaaaaaaaaaaagaaagaaaagaaaaagaaataagcatcaaagttcagtttggttccttcccacctacccttcattgctttcaaagtgccctcacacttgtgttctcaacagaagtctccctcccccaggcacctcctcccagggcctctccagccctgaggtcccatctcctctgttcctcttgcagagagctgtgggaggacccctctgagttccggcctgagcggttcctcaccgccgatggcactgccattaacaagcccttgagtgagaagatgatgctgtttggcatgggcaagcgccggtgtatcggggaagtcctggccaagtgggagatcttcctcttcctggccatcctgctacagcaactggagttcagcgtgccgccgggcgtgaaagtcgacctgacccccatctacgggctgaccatgaagcacgcccgctgtgaacatgtccaggcgcggctgcgcttctccatcaactgaagaagacaccaccattctgaggccagggagcgagtgggggccagccacggggactcagcccttgtttctcttcctttctttttttaaaaaatagcagctttagccaagtgcagggcctgtaatcccagcattttaggaggccaaggttggaggatcatttgagcccaggaattggaaagcagcctggccaacatagtgggaccctgtctctacaaaaaaaaaatttgccaagagcctgagtgacagagcaagaccccatctcaaaaaaaaaaacaaacaaacaaaaaaaaaaccatatatatacatatatatatagcagctttatggagatataattcttatgccatataattcaccttctttttttttttttgtctgagacagaatctcagtctgtcacccaggttggagtgcagtggcgtgatctcagctcactgcaacctccacctcgcaggttcaagcaatcctcccacttcagcctcccaagcacctgggattacaagcatgagtcactacgcctggctgatttttgtagttttagtggagatggggtttcaccatgttggccaggcttgtctcgaactcctgaccccaagttatccacctgccttggcttcccaaagtcctgggattacaggtgtgagccaccacatccagcctaacttacattcttaaagtgtcgaatgacttctagtgtagaattgtgcaaccatcaccagaattaattttattattcttattatttttgagacagagtcttactctgttgccaggctggagtgcagtggcgcgatctcagctcactacaacctccgcctcccatgttcaagcgattctcctgcctcagcctcccgagtagctgggactataggcatgcgccaccatggccagctaatttttgtatttttagtagagacgaggtttcactgtgttggccaggatggtctccatctcttgacctcgtgatccacccgcctcagcctcccaaagtgctgggattaacaggtatgaaccaccgcgcccagcctttttgttttttttttttttgagacagagtcttcctctgtctcctaagctggagtgcagtggcatcatctcagctcactgcaacctctgcctcccaggttcaagtgcttctccagcctcagcctcccaagtagctgagactacaggcacacaccaccacgcctggctaatttttgtatttttagtagagacgggtttcaccatgttggctagactagtctcaaactcctgacctcaagtgatctgcccgcctcgacctctctcaaagtgctggcattacaggtgtgagccacggtgcccggcccacaattaattttagaacattttcatcacccctaaaagaaaccctgcacccattagcagtccctccacatttccccctagcctgcctcccctgcctcaccagccctggcaactgctaatctactttctgtgtctatggatttgccttctctaaacatttcatataaatggaattacacaatg

SEQ ID NO: 128 - DNA, 8547 bp, Homo sapiens
actctggagtgggagtgggagcgagcgcttctgcgactccagttgtgagagccgcaagggcatgggaattgacgccactcaccgacccccagtctcaatctcaacgctgtgaggaaacctcgactttgccaggtccccaagggcagcggggctcggcgagcgaggcacccttctccgtccccatcccaatccaagcgctcctggcactgacgacgccaagagactcgagtgggagttaaagcttccagtgagggcagcaggtgtccaggccgggctgcgggttcctgttgacgtcttgccctaggcaaaggtcccagttccttctcggagccggctgtcccgcgccactggaaaccgcacctccccgcaggtcagtctgtctgccgaggcgctgcccggcgacctcttcagatggattattacaggtagcgggtggcgtggtaggtactttaaaggaaatcaagcgccaccgcctcgatgcccgcagcgttgtccccagattgcaggaaccgttacgcgccttgcggggaggggaagggtttggcgctgggttacagcgaggtggaaacacgccccttctcttctccaagggagagtgggttggggatgggaaggggcgtcttcggccatttctccagagagtcagctccgacctctccacccaacggcactcagtccccagaggctggggtaggggcgtggggcgcccgctcctgtctctgcacccctgagtgtcacgccttctcctctctgtccccagcatgggcaccagcctcagcccgaacgacccttggccgctaaacccgctgtccatccagcagaccacgctcctgctactcctgtcggtgctggccactgtgcatgtgggccagcggctgctgaggcaacggaggcggcagctccggtccgcgcccccgggcccgtttgcgtggccactgatcggaaacgcggcggcggtgggccaggcggctcacctctcgttcgctcgcctggcgcggcgctacggcgacgttttccagatccgcctgggcagctgccccatagtggtgctgaatggcgagcgcgccatccaccaggccctggtgcagcagggctcggccttcgccgaccggccggccttcgcctccttccgtgtggtgtccggcggccgcagcatggctttcggccactactcggagcactggaaggtgcagcggcgcgcagcccacagcatgatgcgcaacttcttcacgcgccagccgcgcagccgccaagtcctcgagggccacgtgctgagcgaggcgcgcgagctggtggcgctgctggtgcgcggcagcgcggacggcgccttcctcgacccgaggccgctgaccgtcgtggccgtggccaacgtcatgagtgccgtgtgtttcggctgccgctacagccacgacgaccccgagttccgtgagctgctcagccacaacgaagagttcgggcgcacggtgggcgcgggcagcctggtggacgtgatgccctggctgcagtacttccccaacccggtgcgcaccgttttccgcgaattcgagcagctcaaccgcaacttcagcaacttcatcctggacaagttcttgaggcactgcgaaagccttcggcccggggccgccccccgcgacatgatggacgcctttatcctctctgcggaaaagaaggcggccggggactcgcacggtggtggcgcgcggctggatttggagaacgtaccggccactatcactgacatcttcggcgccagccaggacaccctgtccaccgcgctgcagtggctgctcctcctcttcaccaggtaaagcctctgggaggcgtgggccaggtcttttctcctctgaaaaaggcggagtagagacagaatatgctgagtttgcaagcagggccccgggtttggggtttcgctccaggtccccacccctcaaaaccaagatcgcgtcggtaaagggactcacagtgagggctgcgacacgcgcacgcgccccacccagcggtgccccgacccctccggtctcctatcttgtctctatcgtcccctcccctgcttgcgagtgagaacacatttgcaaagacccctccaccccccggaaaaacaagagtttttaaatgcttggagatgagccctgatatctctctccctggcgcattacaatcagaactggaatagttccgaaagaaaaggtaatgtcataaatatgttaaacacagcagcctctcctaggctagtcctcggcgtgcatccgaggccgcccagccctggcgctaaaagcgggccgcccgtcagggctttgttccaggccaaggaagcccatggaggccgggccagccgacaggtaacccgcacagaaactttcagaaggcggccacaactagcgggcagcgctaggtttataaaacctccgcgctaggagtttgagaaatgccggggtagaagacaagaagcagtcacttttacgaaagcagagtagcattcagaaaggcagatgggatatccaggaggcgcctgcagacgtttctggcccctgcgcttggctcagttagcggaccccctgatgcccacgttggtctctactaagcacggattcaacaggtccctggtgtcgggttgccagatttggcaaaagaaaagtaagttttacacgggaatactcacactaaaagattagcccttgttgatctgaaatccatatttaactgggcggcctgtagtatttactgtggaaacactatccctaggggcaaatgtttcgcaaggcaaattttgattgccgaagagaccagaaatcctggttttgtgtcatttcttggagcacaagtgagcagttggagatgctgaatctgcaggcgccacagaaaggtgtttggaaggcagagaatgactctttccttattaaaatccactgcaatctatatttccttagatactgtacagctaccttcacaaattaaaagtttctgtatacttaaaatggctttttagtattaaaatcatagaaacacccatggtgggtgagggagaggcagaaatcgaataaagaaaagtcaaccagagatcagggaaaaggaaatcccggaataggttccataggtttttgtgcatccgcagataggcattttaacttttgaaacggcctttgtttttcattagaaccacaatagttctccgagtactccaattaggcggcaaaaagaaataaaacaatttggaggtcactttcaattcaatatgctgatactttttttttcctttttagtgaaaagacgtatgacagggcttggcaaattacacgatctgtttttgtatatacgttttattgacgcagtcatgcccattcatttatacattgtcgatggctgcgttcactctacaacacaaggcagagcagagtagtgcaacaaagagggtttggtccacaaagtctaaaatagatactctctggctctccccaccatacatgtttctatgaaaaaagttggcagactcctgcaatataatgttgaagaagcgattctaaaaataactccacttcatcacatacgtgtatacattttttttcggagttgcaaacaatcagttacttgttttttgacttctaacactttgactcaaggtagtggacatttctaatcttttaatatttattttggtaatttttgatggctatatagtattttgctatgataatgtatagttatatataatcatttattgaactttaatgttggtcattggccttgattgcatttttaaaatttttattttaattttatgtatttacttaccttagagacagggtctcactaccttacccaggctggtcccaaactcctgggctcaagcagttctcccgccgctgtctggcaggtagctggggctacaggcgtgtaccaccatgcctggctaatttttagaattttaggtcctgttgtggttacatatttttgtatctcttaaattattttctgaaaatacatttctaggcatggattactgggtttaaaatgaggcgggaagaggttaccttcatgtctcttgcctcgtattaagattttgttttttaaaaagattgtatcagtttgtatcatcaacagtgaataagtactacagtttgtaccataattttatgaacattgggtatttgctttcaaatttaaaaaatacagtatgtagctttatccatcaggacaccaattatctttgtataaaatgagaacagcatgtctgttggaattgtccagggaaatgagggagaaaaaaaatttactttcacattgtaactttcgtgggccctgggtgcttttgcctttgtagattccttatactataaaaaaattaaaaattaaatttcatgactaccctgatataaagatgaatgcattaaaatgatgtatgaaaatattttcttctaactaaaagtgagtttttttaggtctgaagattgtaaaagacgtaaaaatattttcatgggcccctaaaaagtgttgtgagccctaggcactgtccctgcggtacccaatggaaaagtcagccttatctactattgtgctttttgaggctgggaaaacttaagagttttttgacttataatgggaaagacagcattagtcatgcaaggcctattacaggaaatataattcttaaagtccatcttgtaatttagtgagaaattaggaagctgttttagatttttttcccagaaatattaatttagtcactgagctagatagcctatttaagaaaaagtggaattaaaataaattataatgtgctttctagatgaaataagaattttgctcacttgcttttctctctccacattaaacaccaaacaggtatcctgatgtgcagactcgagtgcaggcagaattggatcaggtcgtggggagggaccgtctgccttgtatgggtgaccagcccaacctgccctatgtcctggccttcctttatgaagccatgcgcttctccagctttgtgcctgtcactattcctcatgccaccactgccaacacctctgtcttgggctaccacattcccaaggacactgtggtttttgtcaaccagtggtctgtgaatcatgacccagtgaagtggcctaacccggagaactttgatccagctcgattcttggacaaggatggcctcatcaacaaggacctgaccagcagagtgatgattttttcagtgggcaaaaggcggtgcattggcgaagaactttctaagatgcagctttttctcttcatctccatcctggctcaccagtgcgatttcagggccaacccaaatgagcctgcgaaaatgaatttcagttatggtctaaccattaaacccaagtcatttaaagtcaatgtcactctcagagagtccatggagctccttgatagtgctgtccaaaatttacaagccaaggaaacttgccaataagaagcaagaggcaagctgaaattttagaaatattcacatcttcggagatgaggagtaaaattcagtttttttccagttcctcttttgtgctgcttctcaattagcgtttaaggtgagcataaatcaactgtccatcaggtgaggtgtgctccatacccagcggttcttcatgagtagtgggctatgcaggagcttctgggagatttttttgagtcaaagacttaaagggcccaatgaattattatatacatactgcatcttggttatttctgaaggtagcattctttggagttaaaatgcacatatagacacatacacccaaacacttacaccaaactactgaatgaagcagtattttggtaaccaggccatttttggtgggaatccaagattggtctcccatatgcagaaatagacaaaaagtatattaaacaaagtttcagagtatattgttgaagagacagagacaagtaatttcagtgtaaagtgtgtgattgaaggtgataagggaaaagataaagaccagaaattcccttttcaccttttcaggaaaataacttagactctagtatttatgggtggatttatccttttgccttctggtatacttccttacttttaaggataaatcataaagtcagttgctcaaaaagaaatcaatagttgaattagtgagtatagtggggttccatgagttatcatgaattttaaagtatgcattattaaattgtaaaactccaaggtgatgttgtacctcttttgcttgccaaagtacagaatttgaattatcagcaaagaaaaaaaaaaaagccagccaagctttaaattatgtgaccataatgtactgatttcagtaagtctcataggttaaaaaaaaaagtcaccaaatagtgtgaaatatattacttaactgtccgtaagcagtatattagtattatcttgttcaggaaaaggttgaataatatatgccttgtataatattgaaaattgaaaagtacaactaacgcaaccaagtgtgctaaaaatgagcttgattaaatcaaccacctatttttgacatggaaatgaagcagggtttcttttcttcactcaaattttggcgaatctcaaaattagatcctaagatgtgttcttatttttataacatctttattgaaattctatttataatacagaatcttgttttgaaaataacctaattaatatattaaaattccaaattcatggcatgcttaaattttaactaaattttaaagccattctgattattgagttccagttgaagttagtggaaatctgaacattctcctgtggaaggcagagaaatctaagctgtgtctgcccaatgaataatggaaaatgccatgaattacctggatgttctttttacgaggtgacaagagttggggacagaactcccattacaactgaccaagtttctcttctagatgattttttgaaagttaacattaatgcctgctttttggaaagtcagaatcagaagatagtcttggaagctgtttggaaaagacagtggagatgaggtcagttgtgttttttaagatggcaattactttggtagctgggaaagcataaagctcaaatgaaatgtatgcattcacatttagaaaagtgaattgaagtttcaagttttaaagttcattgcaattaaacttccaaagaaagttctacagtgtcctaagtgctaagtgcttattacattttattaagctttttggaatctttgtaccaaaattttaaaaaagggagtttttgatagttgtgtgtatgtgtgtgtggggtggggggatggtaagagaaaagagagaaacactgaaaagaaggaaagatggttaaacattttcccactcattctgaattaattaatttggagcacaaaattcaaagcatggacatttagaagaaagatgtttggcgtagcagagttaaatctcaaataggctattaaaaaagtctacaacatagcagatctgttttgtggtttggaatattaaaaaacttcatgtaattttattttaaaatttcatagctgtacttcttgaatataaaaaatcatgccagtatttttaaaggcattagagtcaactacacaaagcaggcttgcccagtacatttaaattttttggcacttgccattccaaaatattatgccccaccaaggctgagacagtgaatttgggctgctgtagcctatttttttagattgagaaatgtgtagctgcaaaaataatcatgaaccaatctggatgcctcattatgtcaaccaggtccagatgtgctataatctgtttttacgtatgtaggcccagtcgtcatcagatgcttgcggcaaaaggaaagctgtgtttatatggaagaaagtaaggtgcttggagtttacctggcttatttaatatgcttataacctagttaaagaaaggaaaagaaaacaaaaaacgaatgaaaataactgaatttggaggctggagtaatcagattactgctttaatcagaaaccctcattgtgtttctaccggagagagaatgtatttgctgacaaccattaaagtcagaagttttactccaggttattgcaataaagtataatgtttattaaatgcttcatttgtatgtcaaagctttgactctataagcaaattgcttttttccaaaacaaaaagatgtctcaggtttgttttgtgaattttctaaaagctttcatgtcccagaacttagcctttacctgtgaagtgttactacagccttaatattttcctagtagatctatattagatcaaatagttgcatagcagtatatgttaatttgtgtgtttttagctgtgacacaactgtgtgattaaaaggtatactttagtagacatttataactcaaggataccttcttatttaatcttttcttatttttgtactttatcatgaatgcttttagtgtgtgcataatagctacagtgcatagttgtagacaaagtacattctggggaaacaacatttatatgtagcctttactgtttgatataccaaattaaaaaaaaattgtatctcattacttatactgggacaccattaccaaaataataaaaatcactttcataatcttg

SEQ ID NO: 129 - DNA, 6897 bp, Homo sapiens
actaccaccatgctggcctcagggatgcttctggtggccttgctggtctgcctgactgtaatggtcttgatgtctgtttggcagcagaggaagagcaaggggaagctgcctccgggacccaccccattgcccttcattggaaactacctgcagctgaacacagagcagatgtacaactccctcatgaaggtgtcccaaggcagggagatgggtggcacggggtgggggctgcctagttggctggggctttgtggcagggggttgaccagtgtggaccagagtcttaggaaatggagttttggagtttcagcatcagaaagacaggatcttgggatgtccagctccctgactgtgagaacctgggtgcgaagcatcccagcacatgacatctcggtgctgggccccattcagagtggaggcttctccctctaaccactcccacccacctccatcagatcagtgagcgctatggccccgtgttcaccattcacttggggccccggcgggtcgtggtgctgtgtggacatgatgccgtcagggaggctctggtggaccaggctgaggagttcagcgggcgaggcgagcaagccaccttcgactgggtcttcaaaggctatggtgagggggtgcccaagagggggaaggtggccaggtggacacgaaggtctcagtgttcccagccttctccctgactctcctgccaactggaggctaaggcagagtccccagtctggtcttccctccccatctcccttcattgtggcctctccatgtgtatccctcacctgtctccagcgtccctgtcctgattcctccctgcctctctctgccccacctccttattctctctcactggagtctcctctttcccctctctctccatctctaaggacatcctgggtttctgttttccagccctggttctctgtcttcatttgtctttttgtccctcttagcttctgggcttctctgtgtttctcatctctccgcatccctttctcacttcttcctctgtcttaggatttcagggtattcctacttccacatcttcagcctccatctcctggtaacagtctctcttccttccagaccctctctgtttctatctcaatatttttctctcttctccagctcagcttaagaatctttcaccatttttatttcctcctcccagatctccccatatctcacttcccctccctccatcctcttcctccatcactctctttctctccccacttccttcccttcctccatggagtgtccccttatccctctgtttctatgtgcatctctctgtctggcctttctgtttcttttctgattgtcttattctttaaacctggtctctctctctctctctctctctctctctctctctctctctctcctctctctcttctctctctctctcctctctctcttctctctctctctctctctctctcctctctctcttctctctctctctctctctctctctctctctctctctacctcgacatcgtgtttctctgactgagtttgcagctctgctgggcaatggcgctgaatccatctctctcccaccctactccctctctcctccacccttggggagccccttggagctgctccgctcctgcccctgccgccccctggcctgtctccattcccgcgttcacctccccaggcgtggtattcagcaacggggagcgcgccaagcagctccggcgcttctccatcgccaccctgcgggacttcggggtgggcaagcgaggcatcgaggagcgcatccaggaggaggcgggcttcctcatcgacgccctccggggcactggcggtgagcaggggaccccgagtgcgggggcaggagaaggaaaacacccaggacgaggaacccgcgcgcgttctgcctggggatggggactaggtggggaaaggcgcccgcacttccagccctggagtctggcgctgggaatttggctcaacaaggccctgcctcctggaattctgactctcctcagacctctgagttgactctctccccaacccccttctcccgccatacccgcaggcgccaatatcgatcccaccttcttcctgagccgcacagtctccaatgtcatcagctccattgtctttggggaccgctttgactataaggacaaagagttcctgtcactgttgcgcatgatgctaggaatcttccagttcacgtcaacctccacggggcaggtaactggctgcagcccggcccgtgacgcccctaccacaacctgccaactgctcccctacctggagacaggtgccccaaactcccaccgccctccagacagtgtcccctcaaaatcagtccccgatattggacaactggacagttgcaccagaacccaggatggatgtccaataccctgtctccaaggacacctggatagctcaacagatgctccccaaaacagagcctgctggcaggatgcataccctcagctcagctctctcacctgggcacgtgttcccatccccaacttaccgtaatttctaacagatgctccctacccagttcttctgaatattttaacacctggacaagtgactgcgtcaaccggcctcctgcatacctgaacacctggtgctgcaaaatccagcccatcataatcatttcacatctacacaaatgtcccagattagcccactggaatatctggccaagcgccctctacttcacccacttaaatacctgaaaacatggacagctgccctaaccaacaccttaaacacataaatatctagacagattgttccctgacacacaaataagtgttccccaaccctttccaatcacacaccttacagaggtgctcccagtgcatcccacttggataggtaaacacctcaacaggtatcccctccacttcaacatcttcaccagccccactttaatacctgagcacctgaacaaaagcccccaatccagacccagtaagtatctggacagctgtctccaaccaagcctacttgaatgcctaaatacctagacaggtgacactcacctcataccagccccacctgaagagctaaacacctggacaggtgtcttccaactcaacttcacttgaatatctgaacacctagatgtgtgctccaatccagcctcgtttaaatacctgaaacctggatatatgtctcagttcttctcacctaaattactagaccgtggccctggtacctaaccttcctgaaaacttagatataagttcctatccggccccactgaaatacctaaacaacgagacagatgcctttaactcagttccttccttgctatgaaacaaatcccattcccatcagctcctgccccgtgacagctgtccttcccttcccatcctctctctgcaaccccagctctatgagatgttctcttcggtgatgaaacacctgccaggaccacagcaacaggcctttcagttgctgcaagggctggaggacttcatagccaagaaggtggagcacaaccagcgcacgctggatcccaattccccacgggacttcattgactcctttctcatccgcatgcaggaggtacaccccagcagccactgcggggagatgcaaagccaggcagagggaaatcagtctgggagtggggcaggcagatgacacaggcccattcaaattaaccctcatcataataatcctcacaattggctgggtgccgtggctaacagcctgtaatcccagcactttgggaggccgaggcaggtggatcacctgaggtcaggagttcgagaccagcctggccaacatggtcaaaccccgtctctactaaaaatccaaaaattagttgggcatggtggcgcgaaggggggcagaggttgcaatgagccaagatcacggcattgcactccagtctgggtgacagaatgaggccctgtgtcaaaaaaaattaattaattgtttaaaaagtaagtgagcctgcatggtcatgcgcatgtgcagttccagctactcaggaggctgaggctggaggattgcttgagctcaggagttggagtccggcctgtgcaacttagcaagaccaagtcagtataagaaaaaaaaaaacaaaaaaaaactgacagctaagttgataattgaaggacagatggtcagcaaggtaaagaaggtgagaaggaagagcattttgggcaaagccagcagccagggcaagggctggaacctagagcgagtctggtagatctagggtccctctttccacctttggtctgaaccaaagagaggtagatccaaaggaaaagccctagaagggccctgagggcaagaggagtgaggttggcctaaagccccctctccctgcaggaggagaagaaccccaacacggagttctacttgaaaaacctggtgatgaccacgttgaacctcttcattgggggcaccgagaccgtcagcaccaccctgcgctatggcttcttgctgctcatgaagcacccagaggtggagggtaaggctggagggggacggaagtggagggccccagaccctcaaaattccccttcgactggtgcaatgtccccacctgtcccagatcccgggaccctgagacgtgacttgctgtccagagacagggcaacattcagctggtaggcatcagctgagtctcattagatattaaaatattgaaaatgtctgcactgattggtcagtcacttctgtcccaagcccactgagtgcccactgcccgttccaccgggtcatcccctaagttcctccctgtgcctcccctgtgattctggcacaacctggttaacaggatcctactccaacaatgcgaatggctgatgtctgttctgttatgaatgctctacttccgtctcataggcggagccatatcatccaccccattttgcctattcggactatcatttcctgctctgagacccctagatacctaaacacattccccctcctcccccagccaaggtccatgaggagattgacagagtgatcggcaagaaccggcagcccaagtttgaggaccgggccaagatgccctacatggaggcagtgatccacgagatccaaagatttggagacgtgatccccatgagtttggcccgcagagtcaaaaaggacaccaagtttcgggatttcttcctccctaaggtgctatccgcccccaccccccagactacggggacttccagcccctctctgtgtccccagcatcccacccacattagaagctttctagaccctgtcccactccctcaatcagtcaaaaaagacttccccaaccaccacatccgttccacctttccacttagacactcctgagtcctgcatctctccagactctttgtgtcaggagaatcaaacacatgttcccaaacttcctatcttaagaaacagaagccccctttccattcggccttttgtcatagggacagaaatctcaggtcccccaaactcctgcctagaaggacatggaccccatgtctcccaaacttcctgtttcagagatgtgaaccttctatcccccaaagctcctccatcagaggaccccaactcctccatgcctgccacttccccttacctggggcacactagttccccctccagcccctgtgtactttcaccaatcccccgaccctcctcatcacacacaacttcctcctccctaccagggcaccgaagtgttccctatgctgggctctgtgctgagagaccccagtttcttctccaacccccaggacttcaatccccagcacttcctgaatgagaaggggcagtttaagaagagtgatgcttttgtgcccttttccatcggtaagagaccactgtttgctgccaggccacggctcacaccagcaggggcctccctcaccctcctcccctctctgcggtgtagcctggtatttctccagcttggaagttcctgttagaatctacccttgagccagcagctgatacttccttaactaccaagcacccagtacctgcgcccaggtaaaatgaaaggaaacatctttccccgtagatgtatttctctagggtcacacagcagattcctcagatccctaaaaaggagatgacggcacagcagtcatatttgcaagtgtacctggcaggaaaggacatctaaacctcccattgctacacctggcatggatcaccccatctatgatggatgtgtgacattatgcctttttcaaaacccatagaactgtataacacagagtaaaccctaatgtaaactatggactttgttagtaataatatatcaatattggttcaccattgttacatctcttatagaaagaaattgaggctcagggaggatcagagcctcctctgaaactctctcaggccataatattccacccttcctccctgggagagccgcagctggaggtcggtactggggcgaggctgcactgagagtgggcttcacctccacccctcccgcctctcctcctcaggaaagcggaactgtttcggagaaggcctggccagaatggagctctttctcttcttcaccaccgtcatgcagaacttccgcctcaagtcctcccagtcacctaaggacattgacgtgtcccccaaacacgtgggctttgccacgatcccacgaaactacaccatgagcttcctgccccgctgagcgagggctgtgccggtgcaggtctggtgggcggggccagggaaagggcagggccaagaccgggcttgggagaggggcgcagctaagactgggggcaggatggcggaaaggaaggggcgtggtggctagagggaagagaagaaacagaagcggctcagttcaccttgataaggtgcttccgagctgggatgagaggaaggaaacccttacattatgctatgaagagtagtaataatagcagctcttatttcctgagc

SEQ ID NO: 130 - DNA, 27098 bp, Homo sapiens
caggaccatggaactcagcgtcctcctcttccttgcactcctcacaggactcttgctactcctggttcagcgccaccctaacacccatgaccgcctcccaccagggccccgccctctgccccttttgggaaaccttctgcagatggatagaagaggcctactcaaatcctttctgagggtaagacacagacgaatggggtctgagggtgagctgcttcttgccttggtacttggggaagcttcaccaaacagaatgaggcagacttccagagtcaggggtggcacgggcatggttggtgagtacggagcatggtgaagcatgatgggtggtattattaggagaaaagcatcaaattaaatttagcagagtttatttgagcaaagaagtgactcatgagttggacagctccctaaaccaggaaagacaccacacggcagtatggtcaagtggtatttacaggcagaaaaaggaggtgacatacagaaacagcctgattggccacagatcacagcttgccttacttggtcacaatctgagcagtttgcagcctgtgtggactgaaagcccagctgctctgattagccaacacttggctacttgtcacaagaatatattcatttgggccaggtgcagtggctcatgcctgtaatcccagtgcttttggaggccgaggtggtggatcacctgaggtcaggagttcgagaccagcctggccaacatggtgaaaccttgtctctactaaaaatacaaatattagctgggcatagtgatgcgtgcctgtaatctcagctacccaggaggctgaggaaggagaatcacttgaatccaggaggcagaggttgcagtgagccaaaatcttaccactgcactccatcctgggtgacagagtgagactccttctcaaaaaaaaaaaaaaaaaaaagaatatactcccaagttaggttgcagttcactctacagagagagctttaggtcaaatttaatttaattaaacaattctccccttttggtcagcctcaaaattttgagattgaccaaaaccttgggcatcaacattacttctgtcaccatcataatggacttgtctgctctcagtatggaattcacaatggacaatgtcaacgtagttgagtgattctttaccttttcttcatgtttttgttgttcccactgtaatgagcccactggatgtacaaagaatggctgcatatgagcatttaagactctttttttttctgagacagggcctcactctgtcagccaggctgaagtgctgtggcatgatcacgtctcactgcagccttgacctcccaaggctcaagtgatcctcctgcctcagccccccaagtagctggaactacaggtgcatgccaccacgcccagctaatttttgtattttttgtagagacagggttttgccatgttgcccagactggtcttaaactcctgggctcaagcaatccacctgcctcggcctcccaaagtgctaggattacatgtgtgagccaccgcacccggccaagactcttgagaaaatacaacacatcagggagactgttatgatggctctcaggagggtaatacgaagaaaatgaagtcactgggcctgtaataaactttgaggaatgtggacttgggggtatagataaggtccactgtccacagagagaagaaaggctgttaatagtctcttttaacttgagtgtgtccatgaaccaaactgatcaaaatcgaataattcgaagttcagacaataaagatagttcaatagtattagagtccaattggtcatagattttgttcagggcatgatggtaattaaggaccagagcttgctataaaataacttgatttatagagacattcatttgtagttggcctggtaacatatagtatcctggagacccactagaagaaacattaagagtagaaaagtttgggatagccaggcttgctgtgttagtccattctcacactgttataaagacatacctgagactgggtaatttataaacaaaagggatgtaactgactcacagttccacatggctggggaggccccaggaaaatacaattcatggcaaaaggtgaatgagaagcaggaaacttacaatcatgatggaaggtgaaggagaagcaagtaccttcttcacaaggtggcaggaaaaagagagagagccaagggggaagagcctcttataaaaccatcagatcttgtgagaactcactcactatcacaagaacagcatgggggaaaccgcccccaggatccagttacctcctactaggtccttccctccacacctggggattacaattcaagatgagatttgggtgaggacacagagccaaaccatatcacttaccatcaccattcaggatgcttgcaaaccaactgctagctgcacctgtaaacacatatctgtttctttcccctgagaaatgtccttagtgtatttgtggcagtgtctagagaaacagcagtgtcagccgcattttaaattaagttatctgcactagtgaattcactggaaagataagagcaatatttggttttcttcagcaccatacacaagcctccaagatgggcatagaggagatctaaaattgcgtgatgttccattaagcgtttttgttgccacaaatgttctcatctcagtttggagagtggcttctacccatctgaactccttggaggttcaattagctgcaaaattcaagatgtcccttaatgtataacttagcctcagattccatacaactgtcacccaaataccaccaagaatgagcacccaggaacccaactggaaccttttctgaacagaaaccaacttatcttcgtcgattttgaggttgatagtaatttcagttattgactgttttggcttttaactatgggaggtattaggaaactctcagggaaacaatttggaaagcagcagtgagctaggccaaatagcaagttctggacctgtgaggagaaagaacagagtaagcaaacctcaagatactcaaggtaggcactcgtggtgttggaaaagagggtcacctactggcattagagcagagatcagttagatttgtttacccataagtctgcatagctcctgaacaaggtgggaaacttacttttttgtggtctttttctagcatgctgcgaaggtgcataaccacatttagttggaaagagactttactgtatttacttatttatttgtttttaatagagttggggtcgtgctatgttgaactcttggcctcaagcaatcctcccatctcaatctcccaaagtgctgggattacaagcatgagccaccatgcctggccactttacatatttaatccagtaacattacacacgcaattgcccacacccccataggtagtccccaggtcttgcatacgggatgcctggaagcaaaatatgccttttgcagccattattcagatacatttcctatatttagtagtgattatgttattagctagttaatagtatgttattacgtactgttattatattaactaactaataacataatcactactaaatatttccagtgagtgcaaaaaagcaagtggcaatgatgtctagaatatcaagatatagctttccactcctcctttggggtttctgggtgattctcattgggaacatgaagaggcattggcaccagtgaaattatttcctgattttggggcgttggttcagaaactcaacaactccttgttttttttgtttgtttgcttgttttgctagagtataagcctttgctaaagccattcacagattatagtcctatggattttcttgtaaggaaagggaaagggttaggacagcaagaaatggggaagaaaggataaaagataatgctttcatgatggaagagaaatcttgatccacaatcttggaaaagctgtccgcatataagatgccaactgcttctggggaaaaacttccctggtcagctttgccttaaggtctccaacagacatacagttctaggagtctagaagggtcctttccaatggagagatgtggatccaagatccgagaccctgacattttgctacagagaagaacttggcattgtccttcccaatggagtacaaggaacagtcttagaagaacttggtacggtctcttccaatggagttcaaggacagtttgtctggtgtcatttccaaagggcccaacctctaaattctagatcatgaaaggtctggttgtcatcaaccgatgtgtcatcaatgactcattttacctggtgaaaacatgctttggcataaagtattatagccttgcattattgagtcatatcagagtttataagagtgggagatacatgagattctattattaggggcataggccctctattactattttacaagagatctatctatgtctttccagtaggagtggatctgattgccatcaatcaataatacctgagaccaagggactccaatcaattcagcatgctttgcctaatgatatttgtttgtaatactgttgcgggacaatcaaagactggagagaccaaaaaaggttcaggagagtttattaaattaaggtgatcaccggttcagccagacatacatccagaaagtctgagccccgaacaaaggcttttcctacttttaaacatattaaggtgggaactacatgaggcaggaagccagtttcagaagtgagaaacaaagcagttaaataacatttcttacatcttgagaaagacatgtcttgcaacctaaccttatcggtccggtgaccctgcagctgtgcaggaactcactgggcctgtaataaactttgagggatgtggagttggggagtataggtaaggtccactgtccacagagagaagacaggctgttaatattctcttttaacttgaatgtaaggtgtggtcatactttgcagcaaccttaagaggattttaaaatttatattactactactattaggttatagttgatttcattaattccttcttcaataccttatttaactgttttaccacttgtctagtgaaacaagtacctctgtcactggagagttctccaggaatgcccagtaaggaaatacattttctaataaccttttatctacggttatggcattgattgatctttgtgcatagaaatgctttaatacaaccagaaaacatgcaatgaagctggcagttgaattaactccagcttcaagtgttcaaatgatctaccaagtgccagaaatatatcacctgaggtttttgttgtcttactagaattatggatttgataaaccaaatattagttataaaccatttagtaatcttagaatagtcacctcatcaatattttttcactgtttggatcattttctctcttctatgatgagtcatggaatacggagcttttagtaatggaaattttaagaactcaggaaggaccaggcggccatctagggtctccatgagtgcatgcttcacattggaattacagactctaaagtacaaattttaatacaatgagttgcaatttatgcttctctaattcaggtacataacactggtttattaaataggttatcataggtaatttgatggtgccattgcactccagcctgggtaacagattgagaccctgtctctgaattggaactgcacgggggcactgtccttggaggggtgaatgggcatgaagaggtgtctgggtatgagccacaggtatagaatttcactcttctctgccatcctctgttacatcctgggtacctgcctgccactgaaagaatgaggtaaaagaggtggtggcacgaatcaaatagatcttgctgtgccaatgagagagagcagactagcccatgtcagtgccaggagagtggaggagagagggagagcaggagaggagtgtgggtagggagtgctcatcaacagtacacatagtgccctataccggtaactgccactggctcagtatttacctgggttatcactgcttaccatgcctgattttatgattaattatctacttatcattactaatccatcaacccactttccaatgggagaattagaacactgacaataccttccagctcctcttccccttccccctcccatgttgaccatactcctgaatcttaggctcgttatccttttactattaatagagttatttttttaatttctgatcaatggtctttttaatgataccaagtacagagtatatatgccaatactactatgaatttttaaattatttgctcagacagaatacatggacatacaaatgatgaatgtgataattgtcatacatatatatttatcttagacacttagtcaaaacatgtggtctttggttatcagttagacactgtcactttacctggaagatacaaggtaattggtcacagactctcaaattatgaaacatttagatttttcaggggaatgacatggagggagccaaggagtcttatgattagataagatgttgtttgggtggctcacgacaccactgggcaacactcaaagaggtggtggcttatacctgtaatcccaacactttgggaggctgaggtgggaggatcgcttgaagccaggagttagaaaccagcctgggcaaccaaacaagacctggctctacaaaaaagttttaaaaatttagccaggcatggtggcatgtgcctgtagtcccagctacttgggagactgaggcaggaggatgacttgagccttgtagtttgaggctgcagtgagctatgatcacgtcactgccctccagcctgggcacagagcaagaccctgtctcttaaaaaaaaatcatctgcaatgtgaggagtgataacatttaggaacgtgtgtataggtttaaatgctggtcaaagacatcctacacaattcgctgaaccttctctctaagggttttttcccaagctctgcagacgctatctgggcacaaatcatgcctctgttaacagaatttgctgttccttctagctcttggtatcccactgcccgctttctttatgaaagctggtatggtcattgaatatcccaatcctttacaaatttggaaacaagcaaaactgtcaatgaaatttgtatttgcctaaaatgagttttctttctttcttttttattattattatactttaagttttagggtacatgtgcacattgtgcaggttagttacatacgtatacatgtgccatgctggtgcgctgcacccactaactcgtcatctagcattaggtatatctcccaatgctatccctcccccctccccccaccccacaacagtccccagagtgtgatgtttcccttcctgtgtccatgtgatctcattgttcaattcccacctatgagtgagaatatgtggtgtttggtttttttgttcttgcgatagtttactgagaatgatgatttccaatttcatccatgtccctacaaaggacatgaactcatcattttttatggctgcatagtattccatggtgtatatgtgccacattttcttaatccagtctatcattgttggacatttgggttggttccaagtctttgctattgtgaataatgccgcaataaacatacatgtgcatgtgtctttatagcagcatgatttatagtcctttgggtatatacccagtaatgggatggctgggtcaaatggtatttctagttctagatccctgaggaatcgccacactgacttccacaatggttgaactagtttacagtcccaccaacagtgtaaaagtgttcctatttctccacatcttctccagcacctgttgtttcctgactttttaatgattgccattctaactggtgtgagatggtatctcattgtggttttgatttgcatttctctgatggccattgatgttgagcattttttcatgtgttttttggctgcataaatgtcttcttttgaaaagtgtctgttcatgtctttcgcccactttttgatggggttgtttttttcttgtaaatttgtttgagttcattgtagattctggatattagccctttgtcagatgagtaggttgcgaaaattttctcccattttgtaggttgcctgttcactctgatggtagtttcttttgctgtgcagaagctctttagtttaattagatcccatttgtcaattttgtcttttgttgccattggttttggttttttagacatgaagtccttgcccatgcctatgtcctgaatggtaatgcctaggttttcttctagggtttttatggttttaggtctaacgtttaagtctttaatccatcttgaattgattttgtatactaaaatgagttttcaaaaggatctttgtggctaccttattagttcatagaaagtggaggcttgtctggaatgatattaaagaatttttttcattttaattgttttagagacagggtctcagtctgttacccaggctggagtacaatggcacagtcatagctcactgcagccttgaactcctgtgctcaggagattctcccaccttagcctccagagtagctgggactaaaagtgtgagccaccatgccccactatttatttttgtagagatgtgtttgggggacggtctcactatgttgcctaggctggtctcgaactcctggactcaagcaatcctcctgcctcaacctcccaaagcattgggataagttttgcatagacatgtttgaccctctcccttcctttattgcagcaaagatttccattttctcacagggaggacttggggcaaattgtttttgtcgttgttattgttatttgaggatgtgggtgggtcatcttggttaatgtcagtgcaagaacggtgtctgctcctcattattggggttccttagctattcaggcaggcagcagctcccttgagaagacttcctgacccccaggtccccatcatatgctctcatacaccagctgcccctccttactgagcctatgtccttgatagtgctgcatttacctgtgatcctgtggctgagctctccctcacacttccagacaaggaaggcctgtgaggtatcagcacagtgctgaacatagtacctggtacacaataggcatttagtaaatatgtgaacaggaacaaatgaaggagtcagtgagtgaaagctccaagcctgactcagcggaactggcagtcggccagggcctacaaagtgctgcctggccctcagtagggggtggcagatctggggatccctcttcaccaaatagagttgcatcatacaggtaaaggtcccaagtgcctattgttttcttttcatcattttccatgtgtgacaagagtatcacgcaatcatgtgaatcaatggacttagttttctcactagactaatgtgtctaggaattatctgtgttgtcatggggattttccaggtgtcatttacaactacctgtggacaagatgaggtgctaccctcatcttagaattagggatggtggctgggcatggcagcccatgcctataatctcagcactttgggaggctgaagcaggtggatcaactgaggtcgggagttcgagaccaacctgaccaacatggagaaaccctgtctgtactaaaaaacacaaaactagctgggcatggtggcacatgtctgtaatcccagctactcgggaggctgaggcaggagaattgcttgaacccaggaggcggagtttgccctgagctgagattgcatcattgcactccatcatgggcaacaaaagtgaaactccatctcaaaaaaaacccaaacagaaacaaacaaacaaacaaaattagtgatagtgatgctcagcctggggaaagcatttgtccagtggcacacaactgggaaaaggggaagctgagatccagcaggaggtctgtctccaaagccctcctagactaaagctgcttaacaatttgtggattatgaaattctcatagagtttgattaaagctgtggccccctcttttccaaataggcacatacatgtttgcataaagttgtgaggcttcacacactccctaaaactctttcataaaccttccaaggatcctctaggtattcacgaccatctattatgattgcatctcttgggggtggggtaaagagggagggcatgagcaagtgtgcatcagggctgaggaaggtggcgctgttgcttctccatttcccaataagcttccagattctttttgatgtcagagggatgtgggctcgtgtctcagattcaacccgtatgcattgagtcacagttttctcttccgtcagttaagatcatgacaatgagaatgtgtgcccctaaggtggttgtgaggattaaatgggatattgcatacagctagtatataataagtgctcattaaatggcaactaccttgatccactcattcatttattcacgaatccaataacaattcactgggcactttctatgtaccaggaaatagtctaggaattgatgatgtggcatcttggacaagacatacgaggtcactgcgcttatggacattccattggcagagacagataagcaaaaaataaacagataaggaaatgttaggtggagaagagctacaattaaactaaagcagggggatatttcagacagtgatgagaactacgttagattgagtggttaggggaagactgtcttgtttttttttctgagcagagacaatgaaagattcaggtggaaggcactagaaggaggcaggggtggctacaagaatcctgaaacaggaaaaatgtcagagaacaacatggaggaatgagtgggaggagaagtcagagcggtaatagggccacgtcatgtaggaccatgtgaaccctcagtggagacttcagatcttattctcagcaaagtgggaatattgtaggccttggtgagcacgtggatattaattattttacattttagtggggttaccctggcttgtggggcagtgaaacaattgttaagtggagtaagcatgtcatccagaagtccagtgaaggggctttgcagagatcaatgcagggcatttgtaagtaaacttaacaaattttatgacttttatgtcaagtttttattgaacttgaacatcactgtaaaaagcgcacagctcaatgaattttcacaaactgaacatactcatgtaattgacatgcaggccaagtagcaagaatgccccgaaaccctgcaccctgttcttttctattcactatccacctaccatcttgatcatgggttgattttatctgtgtatgaacttcttttttgtttttgtttgtttgttcctgagattgaattttgctctgtcgcccaggctggagtgcagtggcactatctcgcctcactgcaacctccgcctccccgggctcaagcaattctctcgtctcagcctcccgagtagctgggactacaggtgagagccaccatgcctggctaatttttgtatttttagtagagatgggttttcaccatgttggtcaggctggactcaaactcctgacctcgtgatcagcctgcctcagcctcccaaattgctgggattacagatgtgagtcaccacgcctggccctgtgtttgaacttcatacacataaaattatgatgcattgactcttttgtgcctagttgcttccactcaacattatgcctgtgagtttcagccacgttgtcgcctgtagctgtggtttgttcttttttgttgctgtatactagtctattgtgagaaccctcactgattgtctatatctatattgatgagcattttattaagaaagcttctgtgaatattttgttcattttttggtgaacacacatacacatttttgctgggcatgtacctgggagtgaagtggctggtttcctgggtatccatttgttcagcttcaggaaatactgcccagcagttccccaagtggctgcacagtaatcccaccttatccactggagatatcttctgagacccccagtggatgcctgaaaccccacataatactgagcactatgcatactctttttttttcctatacaatcacattatatagggagggtggtatacacagtgcagacatggtggacaaaggatgattcgtgtccggggtgggacagagtggatggtgagagatatcatcatcctactcagaatgatgcacaacttaaaacttacgaattctttatttctggaattttccatttaatattttcagactgcgattagctgcaggtaactgaaactgcaaaaagcaaaaccacagatcataagaagtatgcggtgggggtgatattcatcgtattttatcaaccatctttactgtttagggcacaagccaatcagagcagaccctggctgggccacccattaacctaagcttgtccaacctgccttattttgttgttgttctgttttgttttgttttagctttttagcagcctgaagccatggttttcagtttctgtctccagtgatacacagaaaggaaggatgaggaaggggctttactggcccaaccagaaacggaaactaagaacccatgactgtattctctcccttggacagcgttaaccattaacccttaattgctgggtcccagcaggggaaagggcagcctggggaggcggatgttggggaggggctaattaccaatctggtatgtaagtattttgatagttttacaaatgaggtgtatgctgactaacagccacccctggtgtggatgtgattggcagttccgagagaaatatggggacgtcttcacggtacacctgggaccgaggcccgtggtcatgctgtgtggagtagaggccatacgggaggcccttgtggacaaggctgaggccttctctggccggggaaaaatcgccatggtcgacccattcttccggggatatggtgagagcctcagaggcactgggagggggcgggtggggggtgcatcagggaagggagtatatgggaggaagaaggactcagagccttcttccaacttcttctacaaccaacccacacctcccctgcaccccaggtgtgatctttgccaatggaaaccgctggaaggtgcttcggcgattctctgtgaccactatgagggacttcgggatgggaaagcggagtgtggaggagcggattcaggaggaggctcagtgtctgatagaggagcttcggaaatccaagggtgagtcctgggggatgaataggaaagaaagacaatgaaacactgagagatgcaggtgcacgggaatagaaagacagagaggtatataagggcacagacagagacagacgaaactggagacaccatcagacagagggatagagacagagagggagagagacaggggaatagagagggatggggatgggcaggagagaaacacagagagccagggaaagagagagatgccaggtgtataatgtccaagagttactcaaagaggctggatgtgatgactctcacctgtaatcccagtactttgggaagctcaggcaggaggattgcttgaggccaagagttggagaacagcctgggcaacataatgagatcctgtctctacacaatatagaaaagaagtgagccacgcatggtggtgtgtgcctgtagtcccagctactcaggaggctaaggtgggactacaggatcacttgagcccaggaggttgaggttgcagtgagctgtgattgtaccactgcactccagcctggacaacagagcaagatcctgtctcaaacaaacaaacaaaccctcaaagacatataatttcatggatcaattgtgtctgtcaaagtcaaaaacggaagttaagtaaaagaaaaaaactacagacatttaacaaataatgaactgtgttttccttgccctgggtgaagtgctgatgagctggcagtgagcagacaggccaggtggggtgttctgcccgggtgcagctggaggggtcatcaaagaatcactaggttatttttgagttctccataacttggtgtctgtgagacatgtaggtgaagggtctctggctagcacctccatctcattcatgccaggtgtttaccatctctcttatcaaaatttctcaagagactctgggatgtaaatgcagaggctgcatggggaggtagagacccaggagctatagggaaacggggacaagaagactgaagagaaggacaggaagaaacagtgacacaggcaggaggaaagagacagatggagggaccaaaacaaaaaaatataggttgggtatggggctcatgcctgtaatcccagcactttgggaggctgaggctggcggatcatttgaggccagcagttcaaaaccagcctggccaacatggtgaaaccccatctgtgctaaaaatacaaaaattagccaggcttggtagcacgtgcctttaatcccagctactcaggaggctgagacaggagaattgattgagcctgggaaatggaggttgccgtgagctaagatcacactactgcactccagtctgcatgatagagtgagactctgtctccaaaaataataataataataataaaataaagaacggcaggggggagacaaatatacacacagagagacagaaagaaacaaaggcaaagagaaattgaggcagagaaaattagagagacagacagacaaagcttaggaaaaggtctgcagaggaatgagagaagacaggcaagtgagaaccagagagaggctgcactaacctgatgttcttgggtccttacagaccactctccctccagctggggccagtgctgagcctggtgtatacaggtatcacttaacaagtacagaataattcccagaagactggagagccctagatgtggaaagaagagattaagggggagtaataggtaggggtggaaagatggttttttatttgttttaaattagagacggggtctcactctgtacccaggctggagtgcagtggcacgatcatagctcactgcagcctcaaactcctgggcccatgtgatcctcccacttcagcccctggactatttcaactgggactacaggcatgtgccaccatgtctagctacatttttttttttttttttttgtagagacagggtctccttatgttgcccaggctggtcttgaattcctgatccttttgaatcaggctcccgaagtgctgggtttagaggtatgggcccctgtgcccacccagggctttttaatttatataagcaattgattgaacacctactctgcccagcccctatccctgggatttaactgtactcactcccagagtcagaggtggggcctgagaggaggtgcagagtgagaaccggctgcatggactctatagctgtgttgcctgggtctaaatcctggcctcagtaatgagtagctgtgcaactttggtcaaattactcagcctctcggtctgcccatctataaactggagctaataatcaaattgcatctgcctcacattgttgtagtgagagttcaatggaattacgcgtgacgtgctggtacataattagctgttacggttattctcatgtttaccattactgagtgatggcagacaatcacacagagataggtgacagcctgatgttccccaggcacttcagtctgtgtccttgacctgctgcttcttcctaggggccctcatggaccccaccttcctcttccagtccattaccgccaacatcatctgctccatcgtctttggaaaacgattccactaccaagatcaagagttcctgaagatgctgaacttgttctaccagactttttcactcatcagctctgtattcggccaggtcagggagacggagagggacagggggtgtgggggtgaggtgaacacccagaacacacgagaaaaggatgacctgtcttgggggctcagaaatgcagcttatccttggaagaaacgcagacatgtgaagaatcagggacatggagacctggagggaggagagacggtgagacagggatagagacactgagagagagaatgaggcgtgatggggaggcagaaatagagtcagagagagactgagagaaggaagatgagcaaaaacaagacaaagaagagcagaaatcaagagattctgagagacagagttgatgagaatgagtgtgaaagagagggagagagagagaacgaataaggctttgggcttcatgtctattctgctcctggatgtcatttctgttttattttttttagacggagtctcgctgtttcattccagctggggtgtagtgttgccatcttggcttactgcaacctccacctcccgggttcaagtgattctcctgcctcagcctcccaagtagctgggactgcaggcatgtgccaccacacctggctaatttttttttttttcttttcgagacagagcctcgctctgttgcctaggctggagtgcagtggcacaatctcagctcactgcaacttccacctccctggttcaagcaattcccctgcctcagcctcctgtagctgggattacaggcgcctgccgctatgccaggctaatgtttttgtatttttagtagagacggggtttcgccatgttggccaggctggtctctaactcctgacctcaagtgatctgcccgcctcagactcctaaagtgctggaattacaggtgtgagccaccatgcccagactgcttctggttcttctgtatccttgcttctcagtctttggtaaagctctccacctaaagaaaatgaaggataaatgacaataaggaacagcatttcttcattttctcccatttctccttctccctctgtgtttttttttttaactttccccagattgtaaaggcagtcttctgctcttttaaaacaaaatactaaaatgtctccttatttattaacctggaaatatgcctattacatattaaatttaagaatatcaagctgcagaacagtatgcatagctgtagtttgttgttgttgttgttttcagacagtatcttgctctgttactcaggctggagtgcagtagtgtgatctcaactccctgccacctccacctcccaggttcaagcaattctcatggctcagcctcccgagcagccgggactataggcgagcgccaccacacccagctaatttttttgtatttttagtagagatggtgtttcaccatgtcggccaggctggtcaacatagctacagctattaagcagggatgtatgttggattcacatgtggggttgtcacagttatggattttcaggaccctactttctgggcggtctgatctggaaagtctgggatggggcccaaggtgagtacttgtaacaagcccgaccagtaattctaatgttctcctcccaccgagaaccacagagaaaagtctggaaggagacccaccagacagttaacaatggttatctctagaaggagagattaagaaggaaatttacatctgactatatatgtttgcatttttgcaattatttgcaataaattaggcattccattcttcatcaaagtaatagaaataacctccaaaatacgtagtcctaacatgtcagcaggcttatcttgtgtaagaatcattttattaatatctgacacagcaagggagatgaggagaggtgggaagagggagagaaaagtatgagaaagacaaataaacaggctgaggtagacaatgggtgacacagaaaggaagtgagacagagactaagagagatagaaaggagagaggcagggagatggggcagaggccaagaaaaagacagaaggatgagggaggaagatgcagaaagaggtaaatgtgagatagatcaaaggagatatagagtcagtgagtgaggggttcagaggcagaggggagtggggaagtggggttcccatggagggattggggcccaggaggcgctctctccctgtgacctgctagctcagccctaggcaaacctcaccaccccttctttcttgcagctgtttgagctcttctctggcttcttgaaatactttcctggggcacacaggcaagtttacaaaaacctgcaggaaatcaatgcttacattggccacagtgtggagaagcaccgtgaaaccctggaccccagcgcccccaaggacctcatcgacacctacctgctccacatggaaaaagtggggtctgggagaggaaaaagggaagggaggggagggagggcaagatggagaggtgagaagagggagggaaaaggggtagggaaggggaagatggggagggaagaagaaagactagggaggggagaatagggaaagggaggagagaacatgaggaaggaaagaaagatgaggtgaaaggagggagaaaatagggaggaggaactgagacagggagagaggggaggtgggaagacagaatgaaagacagagggagagagagagaagactggctgaggaaggaattcggggcaagggacaaaaatacagcaacaagagaaaaaactcacagaggcagaaagagacggggacaaaaagagagaaacacatcaaagagatgtggagagagatagaaacagagttaggaagactaaagagaggctgagagagatgagttagagatacgcggttggatgtgtagaggacagagaaaagcaaactgggccagatagtgtcaaagacctttaggccaacggagggcagccagggagatgggcgtatacacagcaaggctacagcctcccctgaccctccccttccttccctactgtggacgcaggagaaatccaacgcacacagtgaattcagccaccagaacctcaacctcaacacgctctcgctcttctttgctggcactgagaccaccagcaccactctccgctacggcttcctgctcatgctcaaataccctcatgttgcaggtgggccagggacagccagtcaagggggtcttctgacctccttctgagctgcagaaatggggctatgggtaccacctggatgagagaggggatgctggcttcctattctgggagcactgtaggctctgggctagattccaaccaagccaattctgttggtggatgcatggatgcatgaagaatctgtccatgcgttctcccactgttttcttccatcacttaaggattttttgttctaaggtttttgtttgtttgtttgttttttgttttttggtttttttttttttgtcttttttgagacagagtctcgctctgtcacccaggctggagtgcagtggcatgctcttggcttactgcaagcttcacttccagggttcacgccattctcctgcctcagcttcccgagtagctggaactacaggcgcctgccaccacacccggctaattttttgtgtttttagtagagatggggtttaaccatgttagccaggatggtctcgatctcctgacctcatgatgtacaaatttagggggtacatatgcagttttgttacatgcgtaggttttgtaatggtcaagtttgggctgttagggtatttatcacccaaacagtgtacattgtacccattaagtaatttctcatcattcaccccccttctgctccctcactcttctgagtcttcactgtgtatcattcctctctctgtgtccatgtgtacacattttgtagcactcactcatgagtgagaacatgcaatatttgactttctgtgccatcacttaaaaatcgatccatccacttatcatttcatctattcattctttaattcattaattaaagaatgtataattactgattctttcatttatgattcatctaaggacatatactgtcattcatttatttggattacttgatccacaagttgatcctttgaaacagtggtatgttgatggactatttgtcattgattcattggctcattcattcattcattcatgcattcatccatccttctacgaactaggtttcactcttatccttccatgagtcaacctttcaattcacccttaatccatccgtgatttccttcatttatcacaataattcactcatttattcacctctgatctacttatcattcaatccagcctttcatttactcctttatttactcatacttcactaatttaattattcacttgctcttccataaatctagccattcatgtgattattcattaattgggttcattgatttctttgtctatggatcattcattagtgattaattaatcaatccatctattaattgataagtaaatacagacatccatttattggtttgttcatttattcatcaatctttccatccatgaattgatctattgattgattgattgatgtttttatccagttgttcatgaattcatctattgttctattacactgttatatacctgaggaccaagaatagtgtctcaactatattataaacacaataaatattagttcattttctactcatcttagagagggtgttttgagaggtttgtagcctggagttcttaatctgaaattccatgcaaaatcgtggtgtgtgtgtgcatgtgtgtgtgtgtacctgggcatgtgggaagaggatctgtaatattcattagatttcaagcagtgagaattcttgttgcttcctccctcctcccctcaccccatgctgattactttgaggggtatcaaggatctaaccctttactataggtttttcattggtcaatagaaagtagtgtccttgctgaaaggtctctttttaaaaaaatttttttttcttttgagatggagtcttgctctgtcacccagtctagagtgcagtggcatgatctcggctcactgcaacctccacctcctgggttcaagtgattctcctgcctcagcctcctgagtagctaggaatacaggtgtgcaccagcacacccagctaattttttgtatttttaggagagacgggattttgccatgttggccaggctcatcttgaactcctgacctcaaggaatccacccacctcaacctccaaaattgctgggattacaggcatgagccaccatgcctggcctgaaatgcctctttaaaatgagattcattggtcttcttttctgtacagagagagtctacagggagattgaacaggtgattggcccacatcgccctccagagcttcatgaccgagccaaaatgccatacacagaggcagtcatctatgagattcagagattttccgaccttctccccatgggtgtgccccacattgtcacccaacacaccagcttccgagggtacatcatccccaaggtaagaccggctggaaccccatagccctcctgtttgggcatcctggattctcttaatccccgaactcaaccttttgttagctccttaattgagtcccgttgtttttgttttttgtatttcttttttgtggagtgtgtggagggttggagggaatggcaatatcttttgatcttgtgatcctccctcaggacacagaagtatttctcatcctgagcactgctctccatgacccacactactttgaaaaaccagacgccttcaatcctgaccactttctggatgccaatggggcactgaaaaagactgaagcttttatccccttctccttaggtaagctggacccacaatttctttcccagacaccagagggcaggtactatccccaacttgagaaaaacaacgagagatactgattatttgagcacttaatatattctgattgcttcacctgccttatcccattccatcttcactacaaccctataaggaggcttgagaaagaagattacattcccaaaggcacatcttggcaagcaggaccttgggcaagtattttaacatctctaaacctcagtgagttcattttcttaaaaagaaaaaatctgttgggcaccactgtaagcccagtgctgtactgggggctgaagataatgcatcaaacaagtcacacagagacagggttcctgccccaggaaatttaaagtccagcagggaagatgggcattcatcaaataataataaaataatcatctcatgaaatgaatgaatgcctgcaacatgcttagaactgcctggcacaaaggacatgctcacaagggcaattattattataattagacataattgtgataagtgctctaaagggagctttgggagcacaaaataggaaatagtagctaatcttgtggtgggtccgtaaggaaaagcttaccagaggaactggcttccaagctaacatgttcatgggtgagcatcaatcaaccattgcaaagtgtgttccaggcaaaggaaacagcaaggacaaaggccaaaggtagaaacgtgatatggcaccattgagaacctataggaagtccagtgagccttgggtgtagattgcagaaggaaataagacaaagggctcatctgggcaggaccttgaaggttgcaggaggagtttggatttatggtctagcactgggaaggtggaaaaggtcttgacgtgctctgacttgtcccagttctcatcctctactctttggctggttaaaagaaaaactttagacaaattaaacttagcagagtctatctgaacaaagaaacaattcatgaattgggcagcacaaggaaccagtaaaggttcagagagctccatccagcaatgtggtcaggcactatttatccacagggaaaggaactgaggtactgaaacagcctgattggttacagctctgtgtttgccttatctgagcatgtctgggcagcttgtagcctgtgactggctgaagcttggctgccctgattgtccaaggttacttgttacaagaatatactctcaagtttgtttacatgttgagttacattacaatttgttatgtagggaggctgctttaggccaaatttaattgaatttaacatgcaccatccatgaaaggccccagaaacaaacccccagtcttgagtttcatcagtgacttcagtgatccagggtttggcccagcccccggttttgcgcagtacagtgacctccttccacattttatcttcaatgaaaattgggaacatgtgtggtgatggcttgaatgtcaatgtcttctctcaattttgctatctgaagtttctttttttttttttgtcttcagacggagtcttcctgtgttgcccaggctggagtgcagtgtcacgatcacagctcactgcaacctctgcctcccaggttcaagtgattctcctgcctcagcctcccgagtacctgaaactacgggcgcatgccaccatgcctggctatttttttttatttttagtagagactgggtttcaccgtgttagccaggatggtgctgatcttctgaccttgtgatatgcccacctcagtttctgaaagtcctgggattacaggcataagccactgcgactggcctgctaatttgttttaagagaggcagagatgtagggaaataaggacagagacagataagtaacaaagataatgagactgagaaacagagttagggacaaagagggaacacatagagatagagatggggagccagtggcagaaagacagagggcaaacctcagacagtatacagagaggaagagagagagacacagagagagagagagtcacgtaaggagaaggaggaggaggaggaataagaggagagagagtaggaaaaggaaggaggaggggagaaaggagggaaaggagagaaacagaataagagataggaaaaagagagagtgacataaaaagagaggaagaaagaatgaacaagacaaataaggtatctttagagggagatgaaaagaaagaatgagagagaaagagattggggagaaatcagattcaaatagatggagataggaagttaagcaagatggaagaaagccaaaaaaaggagaggaaaagaagaaaagctgtgtctgacaggtatagacagagaaaaagacaggagtagggctgccaggggcagaaagaaaggtataacccaagccaaaagggtactgcagccaaagaaattcgaaaggtgtccaaacagacggccccagagatggggagggcgtgatgagagggagataataagcctcaggctgttgtgaaaaatgttaggtcacacaaagagttacagaagaacaggcccagagacctgcctgtttctaagctcatgtcacccaccttctgggtatgccaaagggatgtggacacttttccaaacacctccacatagacacacttgtccaacaacttgacaggcatagggaatgcctgaaaactcacacttgacatggcctttccaaggtttgcagattatgaaacactgaagtgaagggaaaggctccctttgtctctgcctgagctttttccagcaccctttgttcttatttttctcccaatctgtggtttagaatctactgggggttccttgcacctctgagaatcagtggaagccatagaccctccctgtctcatacgcatcagtcccattcacaatttatatacaattgggcttttccccccttgagctcttgaagcctgtggatctcaggctgagactagaagacagcctagagacacagacacagacacatggccagaaacacataccccacacataccccagaaacaaacacaaggcagtaaccaaaccttaagcctccttagcacaagccaagtgctattctaagaatttttacaattgtctcctttaacctcacaagagccctttgagggaggtgccattctccccatatgagaagtgaagaacactaagaatgttgtcataaatgtgctcacactcacacatgtacaggtacacacacacacacacacacacagaaccagaaatgggtcattatactctgtgggtttcaccaaccctttggaactgtaacagaagctagaaactctcttatataaaaatgaacatggcgccgggtgcagtggctcatgcctgtaatcccactttgggaggccaaggcaggtggattatctgaggtcaggagctcgaggctagcctggccaatatgatgataccccatgtctactaaaaatagaagaaattagccaggcgtggtggcaggtgcctgtaatcccagctacttggtaggctgaggcacaagaatcatttgaaccacctgggaggtggaggttgcagtgagccaagatggtgccactgtgctccagtctgggtgacaaagagagactccatctcaaaaaaaaaaaaaaaaaaaaaaaaaaaaaaaaaaagagagagagagaaatgaacgtggcacatccactcaaagatttgcatctggtttcagagcagcttcctaaaagtccaccctgaattgtaggttaaaggccagtcttatgcaaatctgttgcagtggacatttgtgtctgggcttagggacatggcagagcgaagtgtatgcacctgccctgtgcccacactggtgaccttctgtgtccacagggaagcggatttgtcttggtgaaggcatcgcccgtgcggaattgttcctcttcttcaccaccatcctccagaacttctccatggccagccccgtggccccagaagacatcgatctgacaccccaggagtgtggtgtgggcaaaatacccccaacataccagatccgcttcctgccccgctgaaggggctgagggaagggggtcaaaggattccagggtcattcagtgtccccgcctctgtagacaatggctctgactccccgcaacttcctgcctctgagagacctgctacaagccagcttccttcccctccatggcaccagttgtctgaggtcacattgcaagtgagtgcaggagtgagattatcgaaaattataatatacaaaatcatatatatatatatgttcttgttttttgagacagagtctcacactgttgcccaggctggagtgcagtggcgtgatctcggctcactgcaacctccacccccggggatcaagcaactctcctgcctcagcctccctagtagctgggattacaggcatgcactaccacgcttggctaatttttgtatttttagtagagatggggtttcactgtgtaggccaggctggtctcgaactcctgaactcaagtgattcacccaccttagcctcccaaagtgctgggattacaggcgtgagtcaccgtgcccagccatgtatatatataattttaaaaattaagctgaaattcacataacataaaattagctgttttaaagtgtaaaatttagtggcgtgtggttcattcacaaagctgtacaaccaccaccatctagttccaaacattttctttttttctgagatggagtctcactctgtcacccaggttcgagttcagtggtgccatctctgtccactgcaacctccacatcctgggttcaagtgattctcctgcctcagcctctggaggagctggtatcacaggcgtcccccaccacgcctggctaaattttgtatttttaggtggtcttgaactcctgatgtcaggtgattctcctagctccaaatgttttcattatctctcccccaacaaaacccatacctatcaagctgtcactccccataccccattctctttttcatctcggcccctgtcaatctggtttttgtcactatggacttaccaattctgaatatttcccataaacagaatcatacaatatttgattttttttttttttttgaaactaagccttgctctgtctcccaggctggagtgctatggtgcaatttttgttcactgcaacctctgccttccaagatcaagagattctccagtctcagctcccaagtagctgggattacaggcatgtactaccatgcctggctaattttcttgtagttttagtagggacatgttggccaggctggtggtgagctcctggcctcaggtgatccacccacctcagtgttccaaagtgctgatattacaggcataatatgtgatcttttgtgtctggttgctttcatgttgaatgctatttttgaggttcatgcctgttgtagaccacagtcacacactgctgtagtcttccccagtcctcattcccagctgcctcttcctactgcttccgtctatcaaaaagcccccttggcccaggttccctgagctgtgggattctgcactggtgctttggattccctgatatgttccttcaaatctgctgagaattaaataaacatctctaaagcctgacctccccacgtc

SEQ ID NO: 131 - DNA, 32654 bp, Homo sapiens
cttaataagaagagaaggcttcaatggaaccttttgtggtcctggtgctgtgtctctcttttatgcttctcttttcactctggagacagagctgtaggagaaggaagctccctcctggccccactcctcttcctattattggaaatatgctacagatagatgttaaggacatctgcaaatctttcaccaatgtaagtctgccttatgttcctccagccaattgcaaagggtaagttatttgactgctatttttagacaaaatatattcctggaagcacactattataatagatcattgtaaagcaaaatactccctctgaacttctttgatgtttcttttgtcttcctattttttttttttttgagacggagtctcgctctattgcccaggctggagtgcagtggcactatctccactcactgcaagctctgcctcccaggttcacaccattctcctgcctcagcctcccccgagtaactgggactacaggtgccctccaccatgcccggctaattttttgtatgttttagtagagacagggtttcaccgtgttagccagaatggtctcagtctcctgacctcatgatctgcctgccttggcctcccaaagtgctgggattacatgtgtgagccaccgtacctggcctcttttgtctttctaagtctgtcattgtcagaaatagcggagtgagttgatgcattttgtgaatacagaaacattggggtcattgtattatataatcatttaatacagtggcaaaagtttaaagtgctgtttctcctctttgtttcacagtgttttgctatgatttttgactgaaggtgaagggaagtgtgtgtgattagaaatttcatccaataagttctctactatagtagtcatgtgttttattcagaatggtcatgaaaattgaacttctctgaagattcatttgatggctgatgtgaaataaatatctgtgggttcagggcaaacataagtgcatgaaagaaagaagtaatcagtcagggcccaataggtagttaacagaattcttttggattctgaagaaagccactgtctgtggccaaggttgctggagaatggaagaaattgttcttccaggagatgctgaatgtcctgattctaactttgtggtgcttcatcgttccatattggtaataccagcagttacaaactggactgggcattagaatcacctggggtgacactgtaaatacagatttctagggttcatcacaggactgctgtatcagaatcctcatgttaagagctttacaagtgaccctgaagtctttagctgggtagtggcctcaaggtggacatgggggattgattaattgctcaagcatcagtttaaattagcagagattccagtttggagcttctacatattacctgtgggactctgagaatgaatctgcaattctctggcctcagtttcttcatttttaaaacaggtcaaatgaatgtgctgaatgtgttgaagtgaggatgaactgtgtgatttgtgtaccaattgcctgggtcattgcgtggcacatcacaggccatctataagtggcagctataacaatcaccatcacatttatgtacaaaattcagaaatatcgaatctatgtgtggcaaatatgaacattaaaaaatacaatgaaaatgtcagtctgaatcatacatagtatttggagcaaatagcgacttattttgctgctatttgcatttcctttcccagttctcaaaagtctatggtcctgtgttcaccgtgtattttggcatgaatcccatagtggtgtttcatggatatgaggcagtgaaggaagccctgattgataatggagaggagttttctggaagaggcaattccccaatatctcaaagaattactaaaggacttggtaggtgcacatatttctgtgtcagctttggtaactggggtgagggggatggaaaacagagccctaaaaagcttctcagcagagcttagcctatctgcatggctgccaagtgttgcagcactttcttccttggctgtgaattctcccagtttctgcccctttttttattaggaatcatttccagcaatggaaagagatggaaggagatccggcgtttctccctcacaaccttgcggaattttgggatggggaagaggagcattgaggaccgtgttcaagaggaagctcactgccttgtggaggagttgagaaaaaccaagggtgggtgactctactctgcgtcattgaccttaacagttacctgtcttcactagtgacgtccttggaaacatttcaggggtggccaggtcttcattgcgcatcctggttgtcagccctcaggtggtggagggagatttgaagcacagagacaagggaggttttgtgtatctgtgctttgcctgtataaatgtgttggttcatagggtgtaggaataaaaggtcatttaatcctattttctgctcaattttgtttccttgttttcaaatcagaaattataaataagggtcttgagttcatttttgaagagttaaagaaggtttcccccatagcataaatctgcattacctccaccagaacatttcaccagagaacacttggaaagtggacatggtgaaagtgacctcatcacacttcatgaaatatgaaccaagttatatgtgctttcatttaattcgagttttttcatatggtcatactcacatgtctggaaattccttccaggtccatgcctacagctctggccagcaatgacactatgtatggttttacttgcttaggtatatctcagtacagttttcatcagttcttatttctcgggaaacacagtactatttgaaaactgtcaggattaattatttcttgttaaccactacttactgtagcaattaatatattttaagtaaatataatctatagtataactcagcaaatacacaaacactaatttgtaaataatttgtttaactagattttaactattatgaaaaactctttatcctgtcttctttaaatgtaatttggctatgttttcagttttgtcatcttttttcccctgtattggttcttagctttgaaatttgtgctaatcatttttctcccactgccaatttactcacctatgaagtgcttgttataatcaatctgattatcagctgggatataaaattacctttttaaattcactctcccaaatgcagtaaaaaaaaaaaaacctggatatcagattgtacctgagaaacacacacacacacacacacacacacacacacacactctctctctctctctctctctctctctctctctcaccaaggcttcccaaattacctttcacccccttggctaaaacaacagtttttctgaaactttagagccctgtaatgtttaaaggagtctggcatagaagcagctaactcagcaggtttcttgttgttcaatgttccaactttattcacaaccctttcatttcgtgtcactcttatttaggacctatagatgtgaatttgggcaccctttccatttatgttcactagtcacttggttacagcaatttcattttagagattccttcaccgaataaaagcctttttaataatttctttacctgtaaaattacagatttggcctaacttatggtcaaatttaaaactttattaaaacatacttatcttgatgactatactgaataatatcccagaatccacaagagtagttttgcccaaatgaattaaatttggaagatgattggaaatgataaacattatttccaaaggaaggaaattcattttttacaaattgaaaaaataaataaaaagattccatttatcaatttactttttggttagctttactgggatttagatttgaaataaaaagttagcattttacttatttagataaacaaatctgttatacttaatgctcatttatattagtttttcttctcatatcatatggatgtacttgcttttcacatttgttccctaaaacacatgaattcacccacaatctccctaactttattcccattggttcagcacattatactttcagctatatgacatttctaggtccccaacttttctcttcctatctctgtgttttattgtccagaggctttgcaaacagacatgattctgctctaaaaacttgaattattaggatttcaaaaaagtcttctttttccttccaaaataaaagacacttggggttaaaagagtttaaataaaggcagtggatgtgaataaccacatgcgaaatgacattgtttagctagcctgtaatgctcaactcatatttaaggtaaaagtaatgtgtttatttcatccatgctgattttttttggacacatggggaatttgtaagatattgtttaaaatttctaaatttcctttatgtcttaacaaatgcaaatcttttaaatatttattttttaataatttttttaaaaatttttaaatctttagcttcaccctgtgatcccactttcatcctgggctgtgctccctgcaatgtgatctgctccgttgttttccagaaacgatttgattataaagatcagaattttctcaccctgatgaaaagattcaatgaaaacttcaggattctgaactccccatggatccaggtaaggccaagattttattttccttggaaaccatttattcaaggttgtagggaagacttggtttaaaaatgagaaaattgatactaaaatgcttttatacaataaaaatgatgtatgagtgaagaaaataattaccacctttgatttcctgttcaaaattttcagcctccaatctttaggtacagaaaattgctatatgtgcacaataaaaatttccccatcagaagtgcaaggggtcagggaattccctttcctagccaagcaaagctgtgaacagatggcacctggaaaattgggtcactcccaccctaatactgtgcttttctagtggtcttagtaaatggcacaccaggagattatatcctgcacctggcttggagggtcccatgcccacgaagcctcactcattgccagcacagcagtctgagatccaactgcaaggcagcagcgaggctgggggaggggtgtccaccattgctgaggcttgagtaggtaaacaaaaccaccaggaagctcgatctgggtggagcctactgcagctcaaggaggcctgcctgcctctgtagaatccacttctcggggcagggcatagctgaacaaaaggcagcagaaacctctgcacacttaaatgtccctgtctgacagctttaaagagagtagtggttctcccagcatggagtatgagatctgagaatggacagacggtctcctcaagtgggtccctgacccctgaatagcctaactgggaggcaccccctagtaggggcagactgacacctcacagggctgggtacccctctgagacaaaacttccagaggaacgatcgggcagcaacatttgctgttcagcaatatttgctgttctgcagcctctgctgctgatacccaggcaaacagggtctggagtggacctccagcagactcgcggctgaggatcctgactgttagaaggaaatctaacaaacagaaaggacatccacaccaaaaccccatctgtacatcaccatcatcaaagaccaaaggtagataaaagcacaaagatgggggaaaaacacaacagaaaaactgaaaattctaaaaatcagagtgcctctcctcctccaaaggaatgcagctcctcaccagcaacggaacaaagctggatggggaatgactttgacgagctgagagaagaaggcttcagatgatcaaatttctccaacctaaaggaggaagctcaaacccatcgcaaagaagttaaaaaccttaaaaaaagattagatgaatggctaactagaataaccaatgcagagaagtccttaaaggacctgatggagctgaaaaccatggcaggagaactacgtgacacatgcacaagcttcagtagttgattcaatcaaatggaagaaagggtatcagtgattgaagatcaaacaaatgaaatgaagcgagaagagaagtttggagaaaaaagaataaaaagaaatgcacaaagcctccaagaaatatgggactatgtgaaaagaccaaatctacgtctgattggtgtatctgaaagtgacggggagaatggaactgagttggaaaacactctgcagggtattatccaggagaacttccccaacctaggaaggcaggctaacattcaaattcaggaaatacagagaacgccacaaagatactccttgagaagagcaactccaagacacataattgtcagattcaccaaagttgaaatgaaggaaaaaatgttaagggtagccattgagaaagggcgggttacccacaaagggaagcccatcagactaacagcggatctctcggcagaaactctacaagccagaagagagtggtggccaatattcaacattcttaaagaaaagaattttcaacccagaatttcatatccagccaaactaagcttcataagtgaaggagaaataaaatcctttacatacaagcaaatgctgagagattttgtcactaccaggcctgccctaaaagagctcctgaaggaagcactaaacatggaaaggaacaaccggtaccagccactgcaaaaacatcagattgtaaagaccatcaaggctcggaagaaactgcatcaactaacgagcaaaataaccagctaacatcataatgacaggatcaaattcaagcataacaatattaaccttaaatgtaaatgggttaaacgctccaattaaaagacacagactgggaaactggataaagagtcaagacccatcagtgtgctgtattgaggaaacccatctcatgtgcagagacgcacataggctcaaaataaagggaaggaggaagatctatcaagcaaatggaaaacaaaaaaaggcaggggttgcaatcctaatctctgataaaacagactttaaaccaacaaagattaaaagagacaaagaaggccattacataatggtaaagggatcaattcaataagaagagctaactatcctaaatatatatgcacccaatacaggagcacccagactcatcaagcaagtccttagagacctataaagagacttagactcccacacaacaataatgggagactttaacaccccactgtcaacattagacagatcaacgagacagaaagttaacaaggatatccaggaattgaactcagctctgcaccaagcggacctaatagacatctacagaactctccacccctaatcaacagaatatacattcttctcagcaccacaccacacttattccaaaattgaccacatagttggaagtaaagcactcctcagcagatgtaaaagaacagaaattacaacaaattgtctctcagaccacagcgcaatcaaactagaactcaggattaagaaactcactcaaaaccactcaactacatggacactgaacaacctgctcctgaatgactactgggtacctaaagaaatgaaggcagaaataaagatgttctttgaaaccaatgagaacaaagacacaacataccagaatctctgggacacatttaatgcagtgtgtagagggaaatttatagcactaaatacccacaagagaaagcaggaaagatctaaaattgacaccctaacatcacaattgaaagaactagagaagcaagaacaaacacattcaaaagctagcagaaggcaagaaataactaagatcagagcagaactgaaggaaatagagacacaaaaaacccttcaaaaaatcaatgaatccaggagctagttttttgaagatcaacaaaattgatagaccattaggaagactaataaagaagaaaagagagaaaactcaaatagatacaataaaaaatgataaaggggatatcacaaccgatcccacagaaatacaaattaccatcagagcatactataaacacctctacacaagtaaattagaaaatctagaagaaatggataaatttctccacacatacaccctcccaagactaaaccaggaagaagttgaatctctgaatagaccaataacaggctctgaaattgaggcaataattaacagcttaccaaccaaaaaaagtccaggaccaggtggattcacagccaaattctatcagaggtacaaggaggagctggtaccattccttctgaaattattccaatcaatagaaaaagagggaatcctccctaactcattttatgaggccagcatcatcctgataacaaagcctggcagagacacaacaaaaaacgagaattttagaccaatatccctgatgaacatcaatgcaagaatcctcaataaattacggcaaactgaatccagcagcacataaaaagcttatccaccacgatcaagtgggcatcatccctgggatgcaaggctggttcaatatacgcaaatcagtaaatgtaatccagcatataaacagaaccaagacaaaaaccacatgattatctcaatagatgcagaaaaggccttttaaaaaattcaacagcacttcagtctaaaaacactcaataaattaggtattgatgggacgtatctaaaaataataagagctatttatgacaaacccacagccagtatcatactgaatgggcaaaaactggaagcattccctttgaaaactggcacaagacagggatgccctctctcaccactcctattcaacatagtgttggaggttctggccaaggcaatcaggcaggggaaagaaataaaaggtattcagttagaaaaagaggaactcaaattgtccctgtttgcagatgacatgactgtatatctagaaaaccccatcatctcagcccaaaatctccttaagctgataagcaacttcagcaatgtctcgggatacaaaatcaatgtgcaaaaatcacaaacattcctctacaccaataacagacaaacagagagccaaatcatgagtgaacttccattcacaattgcttcaaagagaataaaatacctaggaatccaacttacaagggacgtgaaggacctcttcaaggagaactacaaacaactgctcaacaaaataaaagaggctacaaacaaatggaagaacattccatgctcatgggtaggaaaaatcaatatcatgaaaatggccatactgcccaaggtaatttatagattcaatgccatccccatcaagcaccaatgactttcttcacagaattggaaaaaactactttaaagttcatatggaaccaaaaaagagcccgcattgtcaagtcaatcctaagccaaaagaacaaagctggaggcatcaggctacctgacttcaaactattctacaaggctgcattaaccaaaacagcttggtactggtaccaaaacagagatatagaccaatggaacaaaacagagccctcagaaataataccacagatctacaactatctgatctttgacaaacctgacaaaaacaagaaatggggaaaggattccctattcaacaaatgttgctgggaaaactggctagccacatgtagaaagctgaaactggatcccttccttacaccttatacaaaaattaattcaagatggatcaaagacttaaatgttagacctaaaaccataaaaattctagaagaaaacctaggcaataccattcaggacataggcatgggcaaggacttcatgtctaaaacaccaaaagcaatggcaacaaaagccaaaattgacaaatgggacctaataaaactaaagagcttctgcaaagcaaaagaaactaccatcagagtgaataggcatcctacagaatgggagaaaaattttgctatctactcatctgacaaagggctaatatccagaatctacaatgaactcaaacaaatttacaagaaaaaaaccaaacaaccccatcaacaagtgggcaaaggatacgaacagacacttctcaaaaggacatttatgcagccaaaaaacacatgaaaaaatgctcatcatcactggccatcagagaaatgcaaatcaaaaccacaatgagataccatttcacaccagttagaatggcaatcattaaaaagtcaggaaacaacaggttctggagaggatgtggagaaataggagcacttttacactgttggtgggactgtaaactagttcaaccattatgaaagacagtgtggtgattcctcagggatctagaactagaaataccatttgacccagccatcccattactgggtatataccctaaggattataagtcatgctgctttaaagacacatgcacacgtatgtttattgtggcactattcacaatagcaaagacttggaaccaagccaaatgtgcaacaatgatagactggattaagaaaatgtggcacatagacaccatggaatctatgcagccataaaaaaggatgagttcatgttctttgtagggacatggatgaagctagaaaccatcgttctcagcatactatcacaaggacaaaaaaaccaaacactgcatattctcattcataggtgggaattgaacaatgagaacacttgaacacaggaaggggaacattacacactggggtctgttgtgtggtggggggagggggaagggatagcattgggagatatacctaatgtatatgacgagttattgggtgcagtacaccaacctggcacatgtatacatatgtgacaaacctgcactttgtgcacatataccctagaacttaaagtgtaataaaaaatgtatatatgtataaaaatttcccttcaaaatggacatgatgtcttattcatatttatagttataatttcaatcagggcttggtgtaagatacatatatcttatgacatgtttatatttaatattcttttctcttttaggtctgcaataatttccctctactcattgattgtttcccaggaactcacaacaaagtgcttaaaaatgttgctcttacacgaagttacattagggagaaagtaaaagaacaccaagcatcactggatgttaacaatcctcgggactttatcgattgcttcctgatcaaaatggagcaggtaagatattagcaacagatcagtattttgatttcttgtccattttgtgattcatcgaatccttctgtaatttactaaggatgtttaaatgatcaggccagtaatgcttgacaagcatcttaattacttattgtatttatgggcctgcactaaacatcatggaaaatacaaaattgtccaatggctagaatgcatagaccctcttcttgaaataaaaataatctacatgagtagaataatatagacactgcagtcaaatggaaacaattataaataagtagaaaatacaaaatatcctaccacaaactgaagatgaatatcaatattgcacatagattatgtgacaatggaaaagaatggcttatcataaatgggcttcctgtatgccctgcacattgacatagcccttaatatattttcagtgtggaacagaagaaaggtttcagatggaatgagtagtttgtggagaggtgagtggtgggaaagagttggtggatggaagagagaaggtttaatttagtgtaacctaaaatgaatttgcacaaaggagttggaggttgatgtttatcaggtaacctgtgagagtgaatcctgttttcattgaactatttattgaaaaagtatattttttcctattgaattgtcttgacaacctcattaaaaaccagttgagtataaatgtgaggatttgtttgtgggctctcaattctactccattggtctgtctgtccttatgtcagtagtacctcattttgaagtcttaattactgtagttttgtgtcaagttttcaaatcaaaaagtatgagtcctcaaagcttttttcaagactatttgggcttttttgtgttcattcagtcgcaacaaaaatttaagaataaacttgtcaatttctgcaaacaagcccataggaattttaagattgcattaaatctatagattaattcagaaaattatgacattttaaatattgagatgaaattcatataccatatatcacccaatttaaagtgtacactttaatggtattttgtttaattacaatactgtgcaactgaggtaggaggtgggagtcaactccagaggtgggtcttggacatgggaccagattgatggctagctaaaacagggccaggatgaaagcagctttcaatcattcctgcccaccagtatgccgtgtcaatttactattcccatggcaacacccaggagttacctcccctttccatggcacccaatgatccaaaagataggaccccttccttgcacaaactgtcccttaatatgcatgcaattaaaagtgggtataaaaatgaccacaaaactgccctgagcttctactctctgcctatatcatagccctgctctgcaggagccctcgcagagctgtaccactgcctgttcaacaaagctgttttcttctacctctgagttgcctttgaattcttttctgggcaaagccaggaaccctcccaggctaagctccacattgggactcgcctgccctgcatcacaactaccattcctctctactttcaaaacttttttatcactccacagaaacatactatatcattaaatagttacacctcattcccaactccatcatgtagtaaacattaatcaactatctttatggatttgcctataatgagtataacatttgacccatggcatatgtgatcttttttcctggcttctttcacttagcataatgatatggagggtcaactaagatttagcatgtgatagtactttgttgttttgtgtggttcaataatattccattttcatgtacacatatgacaatttgcttatcattcatctgttgatgatcatttgtgttattttcaccttttggctcttataaataatgttgctatgaacatttgtatacaagttacttcatgaatatattttcatttttccagggtatagtcctaggagtgttatttctgggtcatatggtaattttatgtttaactttttgagaaacaactaaacatttctacagtaaatgcaccattttaaaatcccatcagcaatgtttgagggttcctcttttccatattatagccaatatttgtaattttctgttttttgtgtcagtgcaaagtggtatttcattgtggttttgacttgacctatgatattaattagctttttaccatttttacatgttctttagagaaatgttattcaaggcccttgttcatttttattttattttatttatttattttggagacaaggcctctctgtgttgctcaggttggagtacagtgctgtcatcttggctcactgcaacctctgactcttggtctcaagtgattctcctacctcagcctcccaagtagctaggagcacaggcacaaacccccacacccagctaatttttgtattttttttgtacaaacttggtttcaccatgtttcctaggctggtctcaaactcctgagctcaagcagtccacccatgttggccctcccaaagcactgggattgcagttgtgaggcaccacacctggccctttgcttatttctatactgggttgcttgtcatttgttgttgaactgtaggtaattgtttatggattctgggcattaaacccttactaaatacgtatgaaatacaaatattttctcccattctacaggttgtcatttcacatttttaattttgtcctttgatgaacaaacattttaatttggtgaggcccagtttatctctcttattttagttgttttggtgtcaaatctatgcatccacttccaattctgaaggcattaatatttaaccgatgttttattctaagaattgtatagttttagttcacatttaagtttttcgttcactttcagttatattttgcataagagtgagataggggttcaacttcattcttttgtatgtggctacccagttgtcccagcactgtttgttgaagaaacgcttcctttatttatttatttttttttgaaactcttcctttagattaaatgatcttggtacatttgttgaaaatgaaccgggcatagatgattaggtttatgtttggatttcaattttattccactggtctttatttctttccttttgccagtaccatgctgttttgactactatagttttgttttgaagtctggaaatttggaaattgagtcctctccctgtagttgcatataaattcaggattggcttttccatttttgcacaaataaaaattttaaaaaggacattggaattgtgacagtgattacattcaatctttagattacttttggaagcattgccatcttaacaattttaagtctttcattattattattattatactttaagttttagggtacatgtgcacaatgtgcacatttgttacatatgtatacgtgtgccatttcaatcctttaaaatgacatggtttgccatttatttagatactccttatttttctaagcaacatttcatagttttcagtcttttatcttcttgattataggttctcagggcttttggcccttttgatgctattgcaaatgtaactatttccttgattttattttcatattgctcattgctgatataaacagacacaactgatatctggaccaatcttacatcctaaaattaagctgaaaacatttatcagctctagttgttttttgtgggttatatggacttttctttatatataattgtgttatcttaaaatagaaatagttttacgtcttcctttcttacctaaatgccttttatttctctttcttgtctaattgttttggctaggaccttaagtgctatgctgaatagcagtagtgaaattggatatacttggatcttttccccctgattttggggtataagcttttagattttcacaatttgatataaaatacctttggaatttttataaatacattttctcataagaaatttcccttctattcatatctttgagtgattttatcaggaaaagtattgaattttgtcttatgctttctcagcttctattcagatggtctatcttgttagatttttcctttctttctaatatggtggtgtattacattgattgattttcttattgaagcactcttgcactcctcatatagatcccatttagttatggcacataatccttaattttttttaaaaaaatccataatatacaagttgctacattatttctctttcttgtctaattgttttggctgggaccttaagaacgatgctgaatagcagtagtaaaagtagatatacttgggtttttttaccccctgattttagggcataagcttttagattttcacaatttgatataaaacatctttggaatttttataaatacattttattatgataaggaattttcccttctattcatatttttgagtgattttttatattatactttaggttctgggatacatgtgcagaatgtgcaggtttgttacataggtatacatgtgccatggtggtttgctgcacccatcaacctgtcatctaggttttaagccccgcatgaattaagtatttgtcccagtgctctccctccccttgctccccaccccccaacaggccctggtgtgtcatgtttccctccctgtgtccatgtgttctcattgttcaactcccacttttgagtgagaacatgcagtgtttggttttctgttcctgtgttagtttgctgagaacgatgtttccagcttcatccatgtccctgaaaaggacatgaattcattcttttttatggctgcatagtactccatggtgcatatgtgccatattttctttatctagtctatcactgatgggcatttgggttggttccaagtctttgctattgtaaatagtgctgcaataaacacacttgtacatgtgtctttagagtagaatgatttataatcctttgagtatatacacagtaatgggattgctgggtcaaatggtatttctggttttagattcttgaggaattgccacactgtcttccacaatgactgaagtaatttacactcccaccaacagtgtaaaagtgtttctatttctctgcatcatcgccagcatctgttgtttcctgactttttaatgatcaccattctaactggtgtgagatggtatctcattgttaattttatgtgtggatattgtaaatgggattactttttaaaattattttttaaattgttcgctgtaggaatatagaaatactaccgatttttgtatattattttgtatcttgcaactttacggaatttgtttattatttctcatagttttttagtggagtctttatgtttttttaaatataagattatattctctgcaaatgagtataatttgacttcttccattctaattgggatcccctttgtatctttctctgattgctctagctaggtattccagtacaatgttgaataacagtggtgaaagtaagcatccttgttgttttccagaccttagaggaaaggcttttagtttttccctatttagtatgttactagctgttggtcttttgtagatagcttttactatggtgaggtatgttccttctataccctgttttttttagggcttttaccatgaaggggtgttgaattttatcgaataatttttcagtatcaattgaagtgaccatatgctttcgttctttattctgttgatatgatgtaccacatcaattaattggcatatgttaaagcacccttgcatacagggataaatcccacttggttgtgatgagtgagctctttaatgtattcattaatttggtttgcagctattttcttgaggatttttgcatgaatattcctcagagacattggcctataacttttttttttaatgtgtctttggttttgttatcagagtaatactggccttatagaattaatttggaagtattccctccttcactattttgtggaatagtttgagtaggattggtattagttctttaaatatttgctagaattcatcattgaagtcattgggtcttgagcttttctctactaggatgctttctcttgagttcaatctgattatttgctataattttgttcaggttttggatttcttcatggttcaatttcagtaggttgtatgtatctaggaatttgttcattacttctaagttttccaatttattggtatatagttgttcatggtagccaccaatgatcctttgaatacctgtgatatcagttgtaatgccttctttttcatctctgacttatttggatcatgtcatatttttccttagtctggctaaaggtttgtcagctttctttaatgcttctaaagaacaactttttgctttgttaatattttgtattgttttctttatttcaatttatttctgctctgagtttattatttcttttctcctactaattttgggtttggtttgctccagctttcgtagttttttaaagtatattgttaggttgtttatttgatgtttttcttctattttgatagttgacacttacagctattaactttattcttagtaccacttttgctgaatcccataggttttgatatgctgtgttttctcatcatttgtttcaagaaatttttcaattttcttcttaatttcttcattgtcccactgttcactcagaagcatattgtttaattttcatgtatttgaacttatacaaaattgacttaagctggattaatgacttaaatgtaagctccaaaactataaaaaccctagcagaaaatctgggcaatacaattcaggacatctttgggagttttattattaaattcctggaagtagtcttcattgggtttaatctgcttggtgttctatcagcttcttgtacttagatagtgatacctttctctagttttggaaagttctctgttattttcccttaaataaattttctactcccttctctttctctacctcctctttaaggccaataactcttagatttgcattttgagactattttctagatcctgtaggtgtgcttcattgttttttattcttttttcttttgtctcttctaacagtattttcaaatagcttgtgttaaagctcactaattctttcttctgctgaatcaattctattctattattctactaaagactccaatgcattcttcagtatgccaattgcatgtttcagctccacaatctctgcttgactcttgtaaattatttcagtctcttcgttatgtttatctgatagaattgtgaatttcttctctgtgttattttgaatatctttaggtttcctcaaaacaactatcttatattctctggctgaaagatcacacatctctgtttctccaggattggtccctggtgccttatttagttcgtgtggtgaggtcatgttttcctggattttctttatacttgtagatattcatcgggggctgggcattctagagttaggtatttttgttgtctttgtagtctggggttttttttgtacacatccttcttgttaggctttccagatattaaaaaggacttaacctattttcgatttgcccctagaatactgcaccagcagtgaactgcactttttttaataaatgggaaatgagttaagtgttgtgatctaagctgtatctgctttaggggcactccaagcccaataatgcagtggttcttgaagacttgtagaggtactgccttgatggtcttggacaagatccaagagaattctctggattaccagaaactcttgttcccttcccttaatttctcccaaataaacaaagtctctctctctgttctgagtcaattgaaactggggatggaatgacacaagcactcatgtatccaccaccactgtgactgcactgggtgagacttaaaacaagcagagcactgggtcttgcccaaagcttgctgcaaccattccctggctactgcctatgtttccaaggatctggggccctacaatcagttggtggtgaatccagccaggcctgtgtccttcccttcagtgaagcaaattcttccagtacccaggcatgtccagaggtaccacccagaagccagggactagagtcaaaaaccttagaagtctatttggtgttctattgtactgcagctgagctgacactcaaaccacaaaatgcagtccttctcactcttccctttcctttccaaaggcagtggaatctcaccccctgagcagtgctaccacaggcccatgcagaatacagaccctgtacaagagccaagtcctggttttggagagtccaggagtgcacttggtgctctaccctcctgtgatcaagctagtacctagttgcaagacaaagtcgactttatatttcactctgatttctcaagtagaaggagtctttcctgatagccagctagctgggaatgtgttgagtcttacctgaagccggtaagcctcagagacttacccaaagccctcaacatagtacctgggtattgctgctagctattcaagccccccactcctcaagcagaagaaagcagtttcttttggaagtgaaaactgtgcagcttgggattaggagaggggggatgtcagcactcccttacccatccccagctgctgtctcagtaggttgcacctcccaccccagtctactgtctctgggcccagttcagcaccaggactcacataaaagttacagtacttgtagccaacactgcctttcaggtttatttaccatcccagagccctatagtccacagtgatgaggcttgtagaaactcggttccaaccactggtatcagagattcacctctggccagggctggtttaaatgctccctctgtgagtgggcatcagctgattttgggcctgttttcctttctgccttaacagaactgcactaattttatgctctataattgctgtgctctccctccctcagtactcagaaatactctctgaaccatgccactgctgccaggggaagagaggatgtcagtaattcaatagtattttttctatctcttcatttcctctttcagtgatatatatttaaatcaaggtgcatgctcatctgattttggttcttatgaaggtacattttgtgtagatagctgttaaactgatgtctttgcttggggaataatcaatgaagcattcaattctgtcatcttgctccactctcccatttgtatatcttcttttgagaaatttctgttcatgttgtttgcccactttctaatgggattattcggatttttttcttgctgttttgagtttcttgtagactctggaaaatagtcctttgttgaaggtatattttgcaaatattttctcccattctgtaggttgtatgtttactctgcttgtcatttcttttactgtgcagaagctctttagtttaattaggtcccattgtcaactgtttttgttgaaattgcttttaaacattgagtcataaatccttagcctacaccaatgctcagaagagttttttataggttttttctagaatttttatgatttcaagtctcatatttaagtctttagtccatcttgagttaatttttgtatgtggtgagatataagaatcatatttcattcttctacatgttcccctgggtaatatcagccaagcacaaatcccacagctaccagcgtaggtggctctttcctgcaagaaccacctcctagctggaagccaataggcacagcctattacaacatctgctggcaaaataacatagcatttgggaaggagaaaacttttatcgtatctcagctaacaccatacccacatcaccccagctaatcggaaggtcttgagtgtgttcacaaacccaatacattgctagtacagctggcatttgagaaaattaccacactaaacctatttataaccaagtaaatcttacaaagtctatgtcactctcttgccacctcgatcagaggtggtgcttgcacctgctgctaggagaccagaggacagttaggcccagttaagccccattcaacattgccctcctttgtagcaaagagtggaacccaagcactgtacatctctcaaacctttccacagcctgaggcatcagagatttccagttggctgacaaagatgtcaatgttcaattatcctcagaaggaagagccaatattacaggtgaataatcataagccaaatggactgttaaagagagagcaatggagcttattggtcaattcataagaagaaagaatctacaactcacaaacacgcacacacacatacacacaaataaagtaaaaagaagctggcagaggtgaaaccctgagagacttagtaatccatggaaagggcaggtaggagtgttctcagcctccctacccaatttggcagactgctgggatctgaactcaaggtgaccttccttgccttcatgagcacaagtactggagtaggctgtggttttgagacttctcgaggatattaccttgttcacacaaggtccctttccttttccttggatctgagctgtttttaactattttggtagaattcactagtgaagtaatcttgagctggaactttttttgaggggggtggagttcttgattactaattcaaataattttcttattgtaggtgtattcacactttcaatttatgagaactttattcgattagtcccttggccttggcatttgcattgcccctactcttctttatccaatataggcagttaatgcctcaagtttttgtattaataattgccatttctcttcactttgtattttcctatttattcctgaacttattcctaagaataagttgcctgttgcctatctggattacaactttgttagacctgtcttgtctttgtgaactcattctctttcactatatttcattcttggttttgttgacatatttgttttacacatttcagctttgtaatgaatatgtaggtgatactgagtctttgtaaatttttgacagaagaaaattgcaaactcttgattcaagagtgtaacacttttcatgatatagccctaatttacctatatctataaactaaaattgtgttcacttacaaataataaaaaaatcataaaaatgaatgtgttaggctgttcttgcatttctataaagaaatatctgaggccagataatttataagaacatgaggcccaattggctcacggttctgcaggctgtacaagcatgatgcttgcatctgctcagcttttggagagtcctcagggagtatttgctcatagcagaaggcaaagcaggaacaggcacgtcacatggcaagaggagaagcaagttggggaaacagttttaaaaaaccagatcttatgtgaactcacttattatcaggataacatcaagggaaataatgctcatgagaaatctacccccatgacccaatcacctctcaccagattccacctataacaatggggattaagtttcaacaaaagatttgggagagataaatatttattatccaaactatatcaagagcttaatcaaatagttggcttatatatctcaaatacaagaagtcttatagtgggctagactagaaataatatggtagccctgaagcatgagagagtcaagtgccttcttttttttttttttttttttaccatatttagtatagaagtcttcattactatgatcaaatgctcatgtcccaagatgatgtcaatcctacctcccccttcacatttgtgttttgagtaatgaggagaaaagagaagaagattcatgttctggtttgaatgtgtcctctacagttcatgtgctaaaagtgaatgcccaatgcaacagtgtttgtgggtgcagcctaacaaaacatgactaggtcatcagtgttctgacctcataaatatactcatgttgttattgcaagagtggggtagttcttgatagcttgttataaatgtgagtgtgccccccccaattgctctcactcttaccctttcttgcccttctactttttgccatgcaatgaaataggatgaaggccattgccagaagccagtgccatgctcttggacttcccagccttcagaatcatcagaaataaatttcttttctttataaattaccaagtctatagtattctgttttataacacaaattgaagtaagacagggcatcagtatacttctgcttttatttctggggaaagaaatattctgtgtgactaacctaagcagcgaatgatttcatgaatggaacttgtaggtctgtcaggaaataaagtttgagtcaactgatctgcagtttctgccataccacacagttgctttttctaatactgtactgtccagtatctcttttggctaactttaaaaaatagtatgttttttaaaatttagtgtatttagatatactggcacataatttgtcagataattgcatgaaatcacttctaggaaaaggacaaccaaaagtcagaattcaatattgaaaacttggttggcactgtagctgatctatttgttgctggaacagagacaacaagcaccactctgagatatggactcctgctcctgctgaagcacccagaggtcacaggtaggaccacagatgatgaacaaagtgaatttcagaacaatgctgagaagatggtgccagtatcctccaccttgtttctctcagagaaggctcattctttaaatttctgtgtcatcagctgtaatctgtctaaatttgatgacacaatttaaaatgacatctttgtacaatggaggaggatgacagagatcagtagaaacagtatggcagtagcaaaataagtaaagcactgatgaagtgtctggatttcagcaaaggtaatttgtggtaaggagagccagcataaattgccctagtattgaatgttggttttattatgaaaagtccactttgaacagtaggttcatttctcattttaaaaattccatgctctaatgctgtggtggggagatgaaaacaatctttattgaagcataagtggaaattctagaattgtactgaggcatcctgacataaattccagtctgggaagtaatctaaaagttagtctcttacaaaggtgtttctatttaagcagaggccatacctaaaggaattttattattctaggagtgtgtttcataaaaatgctatttgaccaaatagggacatttggaagggggtttaataattgcatctttcacatacaacttttctttagaatttacaatttacccttagagtaaactctacatttccttagaatttacatttaaatagttcctgctttgcagcagataacatacctttttccctgtgtcaggatcccactgaaatttcaataactaaattacaaattaaaattatcctgctgaagtgaaaagagaggagaatagaaaatagccaataagtctttggcaaatttctaaaacatggagagacaatggagggctgacaattgacacagcatagaggatggagttgtaagtattagcagaggaagatttatcaagaggagaagctaatctgtgtcactgtgattctcataaggttcagtatttggaggcaccaagagccaaagacagtagggaatgagactgaaaagggaggctctcctgcccaagtttcctccataactccttttatcaggtacctgattttttcccactgggaaagggaagcatactctccagagagactgagcctaagaacccctgtactcggcgacactttacagggccaggaaactgtgagatgtgaagacagaaaaaaaaaaggtttgagaaagatctattcctcagattcaaagactcagcatttttcttcatcttgcttcctgacattcagcagccagctagatactctccagagaagaaacaagtctggagaaaagacctccgtattttgccaacttaatagaaagttatctataaatgtccagcagagtgaatgaaattaaaacatccatcacaggacacaaagtcatggaatttcagagcaccagaagtaaagggaaaattaaaatctttcagagagttatatcaggtcatatataaaatatcagcattcaaacagcatcagaattctcaagcatactatcttgtgtattcatagaaaaaaagtatttgggacctacatggttgctacaaattttaccctctatactaagtttctccaatactgggggttgtgctccatctcatgtctgaaactaagtcagaagaaataatgggtgccaggaatcaggagacctcatgtaagagaatgagagtgtcagagaggctgctgtgctcctaggaaacaaccacttcagaagggaccaggtgaataatacatgtagaggagacttcaagaatcaaagagatgtgattgatagtctgagatttccctataattgggaaattattactaggagtttcaaacatgtgcaaatactctaacttgaagaatagaaaattgtgatttaactaaagaaccaaggaagaatgtgtatgtgtgtatatgtgtgtgtgtgtgtgtgtgtgtgcttctgtgagtatatttagaatgatgtaaacaatgaatagtgatataaccagaaattgtggtctaaatatattctggtaagtagaaggaggagaattgtgtgtgtgtacgtgtgtgggtgtgtctgtgtgtacacatataactttgtgggcgtgtgtctatatatggaatagagatggagatgaaaattctcatctctcataccagaaaatcattaaatattgtctaaaaattgttaagtaaaaaatagaaagaaatagtggttatttagaaatacaaatataaatttcagaagaaactgctagcatgctcaaagtggccacaattggaaatggaagaatgaagacagtaccattgctaattgcatcactgcccctgctccaccaccgcacacacaaatatatttataaaaccattacaatttaacattataccccatatattattttgataatacatatttgattgtttttctgtttgcaagcactgtaatttattgacttattatgttctgtttattttttaaataatgtattacttaaatttgtattgtcatatatgctaatttatagaaatgtacttatgcactgtaatgactagtttgtaggagagtggtatgtatctatattatggtaattctttttatatggctggttgtacttctggacatgtaactcatgtttgtaatgttgctgggatttttatatcatgttaatgtggccatgaattgctatgacaaatgttccatatatcttcgtttccatcagttctttcttgtgtcttgtcagctaaagtccaggaagagattgatcatgtaattggcagacacaggagcccctgcatgcaggataggagccacatgccttacactgatgctgtagtgcacgagatccagagatacagtgaccttgtccccaccggtgtgccccatgcagtgaccactgatactaagttcagaaactacctcatccccaaggtaagcttgtttctcttacactatatttctgtacttctgaaatttccatagtgctggtttggttccaaccctctaacaacacaagatgagagaagtgcaaaactcatacatgtggcagcttgatggactttctgctattttgtttggggctataaagatttataaagctaggtctccttaataggctgctcttaggtgttacactttcaaataattgttgaaaatatcagtgtgtcaatttcccaaaacactcttctgagatttttatcaaagtgacattcattgtgtagttcgatatggaaagacttaacatgttcatgcattgaattttttaattcatgaatatggttatgctcccaacttattgagctttattctattttctcagtaatgtcttattttcagtgcagtggtttacaactcttttattaggtttttcctagataattaatattttgttgtgttataattttttaatttttttttatttctttgtaattggtataagtaattgtattcaattatactattctgatgaccttatatctaacaactttcctaaatttactgatcattgctgataatttatctgtagatatacttggaatttctatgtatattattttgctatctgggttaatatgtattttatatcttattttccaatgattttgtcttcaatttatctttattgcattattgtgctggctaggattttcaggttagcattgaacagaattggtgatagagggcatccttatttcatttctgatctgctggggggtagagtataagaatattaatatttcactactgagaatgatgttttaagtatttttttaaaataattgacttttatttaacttcatttataaaagaattttcacgaatatggtttgaaatgatactctacatttgttatgaaacagatagttggtattttcataaaatcccagcccccagaaggctcatgtcattccaagtgatcagactcctgtaccttccctaaataaggctagcaaactggggatggcagggagcagagcccagagcaccttggtagttttgcacagattttttttttttttttttttttttttttgagacggagtctcgctctgtcgcccaggctggactgcggactgcagtggcgcaatctcggctcactgcaagctccgcttcccgggttcacgccattctcctgcctcagcctcccgagtagctgggactacaggcgcccgccaccgcgcccggctaattttttgtatttttagtagagacggggtttcaccttgttagccaggatggtctcgatctcctgacctcatgatccacccgcctcggcctcccaaagtgctgggactacaggcgtgagccaccgcgcccggccttgcacagattttttaaaagccagtaacttccttctggctgttctaaaagacaaacactttggagaaaagttgtgcagtaagggaaactatcaaaaatcattctcatagaacagtaaggcagtgaggcaaacacgatctccctcatgattttaaagtctgtaatagaaattaacagtgtcatctgcagcccaattatgcactttaagatcccaaaaaattgctgctgttttaagtattttagtagatattctttatcagaaatctttaagattttagtagatatcctttatcagattagggaagttttttctcttctctcatttttatataaatttgtgtcatgaatgtgtgtgcaattttatcaaattgattctctgcatctatttatatgattgtatatactggcctcacatccctcactaaatatacataagtatacacaaacagctggatttgttctgttacttattgttcaggacttctgtattcataagatattttggtctgcaatttttcttcctcaaaattttcttttcagagctttgataacaagataatgctggctgcataaaactaggtgagaaacgttccctaatgtgggtctgtttttattgctttcccttccttccacttttcttcgtgtgactgcttagttgtatccttgaaatgcctaaaaacctatggctcagtaccagatattatatatgaaaaaatgcagaatttcagagaacatttatctttttccagaatgtattcattcccctctcataggcaattataatgacaacacctcctgtcctgattcagaattgaatatgacatgaacacagtcaaaaattgactgtaggtatgagcttacctctctgaagttcttccgtcactggggccaattattgtctttataatctggaggccaattttggtctttgcagctttacaatgctgtctatcacatggtttctgtattcatccagatgttttagttgctatgctataaactacacaattccacttattatttttcaattaaaaataataaaggttatatcttcatgaaggaaaacaatgagactgataaggtttcaattactaatgtcatcctctggagaagacagaattgataacttatcaagatgtgatggggttttccctaattatcactgatttttttacaaggattaggactacaatccacagttttcatcaaagcacacaaccagaagaggtttttctttctcaatacaagggtctatctacacctcaatactgcagtatgtaatgccccaaaacaaagatttttcttttacacaataatagtcacactcagtagctattgttcaaataataatacagcctaaatttaaattttcacaatttttctagaatatttttatggcttttttctcctgcagtttactatacaggcaaggaacaagcatatagttcatttatgttgaccttttcacctcctgtaatcaaggaaagttcctttcctggtttgtttcttttcaatcagttgacctttttgagaccagcagtcatttaaaatgttcctcaggctggttttgtatgactgttttctagaggcagattccagctacaattttggcaagaaaactacataggtgctttaaatatcctgctgaatcacattgatgaggtgggagcatgaaatgtcacatatgtcattattggtcatgctaagttccccacataataaggttgtatcctccagatcttaccattgtaggggttctgctttttatatgcaactagtaaaaatctatgggagtgcattaagattatccgaaactcctgcttccagaatcacacacccaacggttctagctttaattgatgatccttacctgacctgatgatcctgacttgaattgttgcaaagtgataatctttgtaatttcatcatcttttcagtgttttaagctaaaattaatctgtagcatggcagtaataaacacacaatagtttttacttcttattgcacttgtggttgtcatcccagatgacatcatattaaaatagattacatgtttatttacaaaagttctatgaacagatactctggacatttcaagtgtcaacagagacttccattttaaaccataatctacataatcaaaatacaagatgtgtcaaatttgaagtgatgaaatagagcggcaaatgaggccagaaaagggcatccaaacttgatgatctggagaacacattcagaaggttgcacacaagtatccaagatgtaagacttcaaatgtgattggaaagctctttagcaagcttccaccactggccttaagctcatccatgtaaattactgtgtctggctggacctgagtttcctcatctatagatcaacgttatggcgctacgtgatgtccactacttctcctcacttctggacttctttataaatcagattatctgttttgttacttccagggcacaaccataatggcattactgacttccgtgctacatgatgacaaagaatttcctaatccaaatatctttgaccctggccactttctagataagaatggcaactttaagaaaagtgactacttcatgcctttctcagcaggtaatagaaactcgtttccatttgtatttaaaggaaagagagaactttttggaattagttggaatttacatggcacctcctctggggctggtagaattgctatttgtccatgatcaagagcaccactcttaacacccatgtgctccaccctcacaatacaccatcattattgggccagatagcggggcttgcaggagttaactctgttgttcccaattgagaaaatgaacatcttggtttgactgaactctgccactagatacatcactaaggcacccaagagctcctcctagaaggtaaaattcatctgatctttccttacctgccttgacaaatgtatctaagtccacaactgcattgagtgtcttctacatggtgtctgtcacctcccaggctgagctccaagggcacaactttcaatgagaacagaggctcactcttgagttagggaagaagagtaaacaggtcattgtaatttagtcagaccaggactgtgagagaggaaagcacaggcccttgggtagcggctagagggggactctgcatgcttcttgctctctcatataacacagtgaggcataaaatggagtaagcaactcagaggatgtttcatgtgcttcaaaggaggtgataaaatttaagggaagctaagaggttacataagctaagaggttattttgcagtgattccagagcaccctgtcttcttccaatcatgatcatatatcctggatacttgcttttcacacctgtgttttgtgtgctaagtctctggccatggaatctccttcctttattctttgatcttttatgtctgctttatatttggcactgtagataccaacatgacaaggacagagaccttccttcaagaattcacattttaccacaatagataaataaatacagaattacgattcctggtaatctgtgctttaatgaaagcatgagtatgctgttgaggaaaaccagagagcataggatttgattacttgaggggattgtaaagagtgtgaagatgaaatgaaattgaacctatgtcctgaatgtagcctaataaagatgtatcttagccaaaatgaacaacaggatatgaaacttgaaacttcatggtgtgttcaagattgatgaagagagtgtatgaccagagctgagaacagattatgtgaaaagtggaaggaaaagtcatggaatatcaggcttggaacaggaaacaagaatgtgcatgtatttccataatgacagatggaaactcaaaatggcaaaagagctgttttaatgtgggaataaataaagaaatgactgttatggagctgataatcaatgaatatttgttgaatgaagggtgcctattgagattagatgttagacagatagcaaatatatctctttttgtacatttgtttgtcccaccatccattaatcaatccatcatgtcatccatccattcatccacatgttcattcatctacccaatcattaatcaattatttactgcatattctgtttgtgcaagtcacaaatgactgtttgtcacagtcacagttaaacacaaggagtaactacttcctttctttgttatcttcaggaaaacgaatttgtgcaggagaaggacttgcccgcatggagctatttttatttctaaccacaattttacagaactttaacctgaaatctgttgatgatttaaagaacctcaatactactgcagttaccaaagggattgtttctctgccaccctcataccagatctgcttcatccctgtctgaagaatgctagcccatctggctgccgatctgctatcacctgcaactctttttttatcaaggacattcccactattatgtcttctctgacctctcatcaaatcttcccattcactcaatatcccataagcatccaaactccattaaggagagttgttcaggtcactgcacaaatatatctgcaattattcatactctgtaacacttgtattaattgctgcatatgctaatacttttctaatgctgactttttaatatgttatcactgtaaaacacagaaaagtgattaatgaatgataatttagatccatttcttttgtgaatgtgctaaataaaaagtgttattaattgctggttca

SEQ ID NO: 132 - DNA, 50708 bp, Homo sapiens
atggattctcttgtggtccttgtgctctgtctctcatgtttgcttctcctttcactctggagacagagctctgggagaggaaaactccctcctggccccactcctctcccagtgattggaaatatcctacagataggtattaaggacatcagcaaatccttaaccaatgtaagtatgctccttcagtggcttgcaaaaggtaagtaaattcacctgtattttttaaataaagtgtatccctagaggtacatgttacaagaggtaatggtaaagtaaaatactttgaaaggcttttgttgccttttccagtctgtcagtgtcagaaatagtggaatgaaaccatgtattttgtgagtagagaaagatttgggtctttgcatgttagattcaaaataacaagtgtcaatagtttgaaaagctgtgttccttcttcatttcataaccatttgctataatttttggctgaaggtaaatggtaaggtattgtgggatctggtcagcagcccacaaagcaactgggctctctcttttttcccaggtggatcggcaggttgagaaataatagacacacaagatagtgaaagctgggtccaggggggtcaccgccttctggtcccatggtgccaagaatgcactggatataccagcatttattattaagtttagtgagggcaggggtaggttagtgagggatttagggtcatttgattatgaggtgagatggtcacatggggatgaagtaattctttaacataacatttgtatgtagaagtacagtacatttgtatgtagaagtacagtatacggagataagaatttacaatatagtgtgtgcgtcagtaatttctaacagagccttaaaacagaaacacaatctttccataacctatgattagcaagatattaatcagcagtaacaattgcaacaaaagctggttacaaacaatccatggaaataggatgtgaagctagacaaccagttagaccagaaattctcagaagggagtatgccttaaccctaaagaggcctagaagagccatggcaagatgagggcatttatagccctatcttatccatatggacaggtgccccccatgcgtccatttataggttctccacaaaggtcgcattccattcccagagctatgaacatctgcttttctgggataggaatcttggtgatgtgaaacctctctgactgcacgtccattcataggctctctgcagggggaagcacatcacgcgctgttggctcattctggcagtccagcctggcactgtccttacacaatcctgcatgcaattttgtatttacaataatcgggagcatttcatcttttattccgtagcaatagtttcagggggggtctccctacagtaaggaacatgtttgttattagagattttattaaataagtcctctactatattagccatgtgttttattcagaatagccatgaaaattaaacttctctgaagaattaatttatgcctgttgtaaaggaaataactgtgggttcaggaccagcaaaagcagataagtggtagaaaagaagttatagacttccatttttagatccacaaagtactgttttaattatactatagctacaatatataaaccccaaaatgaccttagcatttagtaatggtaggaagaaggtcagaagatgtataagtattagggttttttctcaagtgaaagatggtttagcagtgttaatatgatatgtgaacacccctcgttgtgtaataattaccatatacagagagtaaagggctgcaattagtatattaagtcttataagcatgatggtatgattagatcaagagaatgacgctgtagttatgaagactactcctactagattgatggtagggggcagggcaaggttggcaagactagctaggagtcatcacatggctatcagggagagaagtgtttgaaggccttgtgttagtagtatggtttggctgtgaactcgtttgtagtttgagtttgcaaggcagaataatagggatgaggttagtctgtgggcagttattagggaagttgcactggtaaaacttcagggggtttgaatgagaaaagctacgataacaagtgccatgtggcttatggaaaagtaatgagtgattttagatcagtttggcacagacaaaaggagcttgttatgattatttctcaaaaggatagtaagaaggaggaataagctataaactctgttagggggttaagaattaaggtgatttgtataatcctatagccatctaattttaggagtactgctgtgaggactattgacctggcaattgcggcctctatgtgggcttttgggagtcctaggtggagtccatagagagatatttttagtataaatgctatgatgcatgctaatcataaaaggctattaaaccaggaaattgttagttcttgaagctgggtattggtcttaaggtagactcgaaagtgctgataaatttctcaagcatcagtgtttgaataagcggagtttcaaattttggtctgctgtacattagctgtgagacactgaaaatgaatttgtcattctctgagctcagttttttttttttttttttttttttttgagacagagtcttactctgtagctcaggctggagtgcagtggtacaatcttggctcactgcaacctccatctcccaggtccccattcaagaaattctcctgcctcagtcccccaagtagctagcattacaggcatgcaccaccatgctcagctaatttttgtatttttagtagagacgtggtatcaccttgttggccaggctggtcttgaactcctgaccttgtgatccacctgccttggcctcccaaagtgttgggattacaggcaggagccaccacacctggccgtttgtttaaaatagagtaaatagacctgctgaatatgttgatgtgagtattaattgtaatctgcatagcaattgtctgaccattgccttgaacatcacaggccatctgagtggcaagtataatcatcatcatgtttctatttaaaattcagaaatatttgaagcctgtgtggctgaataaaagcatacaaatacaatgaaaatatcatgctaaatcaggcttagcaaatggacaaaatagtaacttcgtttgctgttatctctgtctactttcctagctctcaaaggtctatggccctgtgttcactctgtattttggcctgaaacccatagtggtgctgcatggatatgaagcagtgaaggaagccctgattgatcttggagaggagttttctggaagaggcattttcccactggctgaaagagctaacagaggatttggtaggtgtgcatgtgcctgtttcagcatctgtcttggggatggggaggatggaaaacagagacttacagagctcctcgggcagagcttggcccatccacatggctgcccagtgtcagcttcctctttcttgcctgggatctccctcctagtttcgtttctcttcctgttaggaattgttttcagcaatggaaagaaatggaaggagatccggcgtttctccctcatgacgctgcggaattttgggatggggaagaggagcattgaggaccgtgttcaagaggaagcccgctgccttgtggaggagttgagaaaaaccaagggtgggtgaccctactccatatcactgaccttactggactactatcttctctactgacattcttggaaacatttcaggggtggccatatctttcattatgagtcctggttgttagctcatgtgaagcgggggtttgaagctgagagccaagggaatttgcacatatttgtgctgtgtgtgtacaggcatgattgtgcgtacagtgtgggtataaaaggttcatttaatcccatgttctcctgaactttgcttttttgctttcaaataagaaatgatgaatatagattttgagttcattttttgaaagagttaaagagcagtgtttttcccattacctattccagaacatgtcaccagagaatacttgacaagtcaacatggtgggaatggccctatcatacccatatggagcatgaaccaaatggcatgtgcttttatttaattggactgtgtttgtatggtcagcctcactgacttctctggggtttcttttaggcccgtgcttgccattctggccagtaatgacattctacagtttttattgcttaggcatatcttagtgcagttctcatcaattattatttctctgtaaacacagcattattttaaaaatagtattaattatttcttgttactgtattgatttatatattttcagtaaatacatcctgtagcataattctgtgaaatacccaaatgtcaatttataaaatgatttatttaacaagattttacttattagtaataactctgtaatctgcattccctatgtatgatttggctctgtttcagttttgcttatctctttccaaccatatttatgaaattttggcttagaaatttatgttaattattttttttccatggccaactctactcatctatgaagttttacaatgaatctgtttatcagcttggataccaaattaccttgtttttaaattctgttttcccaatgaagttaaagactgaaaatcagatttatctgtgaatgacacacacaaactaacagatttccaactgttcaatgcctggccattcattcagagtacttttgattaaagtcactatttagggcctatagatatcaggggaaattcagcccctgatatttcaatgtgagtccttttctattctccctaagtgttggctggtctgagaaataaagggaaagagtacaaaagagagaaattttaaagctgggtgtccaggggagacatcacatgtcggcaggttccgtgatgccccctaaaccacaaaaccagcaagttttcattagtgattttcaaaagcggaaggaatgtgtgaatagggtgtgagtcacagagatcacatgcttcacaaggtaataaaatatcacaaggcaaatggaggcagggtgagatcacaggaccggagtgaaattaaaattgctaatgaagtttcaggcactcattgtcattgataacatctcatcaggagacagggtttgagagaagacaaccagtctgaccaaaatttattaggcaggaatttcctcttcctaataagcctgggagcactatgggagaccaggccttatttcatcccttatctacaactgtaaaagacagacgttctcaaaacagccattttagagaccaccccttgggaatgcattcttctcagggatgttccttgctgagaaaaagaattcagtgatatttctcctacttgcttttgaaagaagtgaaatatggctctgttctgctcagcccacaggcagccagacttcaaggttatctcacttgttccctgaacatcgctgttatcctgttttttttttcaaggtgcagatttcatattgtttaaacaatttgtgcagttaacacaatcatcacagggtcctgaggtgacattcgtcctcagcttaggaagatgatggtattaagagattaaagtaaagacaggcataggaaatcacaagagtattgattggggaagtggtaagtgtccatgaaattttcacaatttatgttcagagattgcagtaaagacaggtgtaagaaattataaaagaatgaatttggggaactaataaatgtctgtgaaatcttcacaatttatcttcttctgccatggcttcagctggtccctccgttcggggtccctgacttcctgaaacatatagatgtgaatttgggagctctttaactataaagtttaatatctcaaaataataagagctatttatgacaaacccatagccaatatcatattgaatgggcaaaagctggaagcattccctttgaaaaccagcacaagacaaggatgccctctctcaccactcttattcaacatagtattggaagtcctggccagagcaatcagtcaagggggtattcaaatgggaagagaagaagtcaaattgtctctgtttgcaggtgacatgactgtatacttagaaaccccatcatctcagccccaaaactgtttaagctgataagcaatttcagcaagacctcaggatacaaaatcaatgtgcaaaaataacaagcattcctataaaccaataatagacaagcagagagccaaatcatgagtggactcccattcacaattgctacaaagggaataaaatgcctacttacacaacttacaagcgatgtgaaggacctcttcaaggagaactacaaaccacttctcaaggaaataagaggtgacacaaatggaaaaaaattccgtgctcatgaatagaaagaatcaatactgtgaaaatagccatactgcccaaagtaattcatagattcaatgctatacccgtcaaactatcattgactttcttcacagaactagaaaagaataatttaaatttcatatgaagcaaaaaaagagcctgtatagccaagacaatcctaagcaaaaacaaagctggaggcatcattctacctgacttcaaacaatactacaaggctacagtaaccaaacagcatggtactgggaaaactggctagccatatgcagaaaacagaaactggaccctttccttacaccttatacaaaaattaactcaagatggattaaacacttaaacataaaaccaaaaaccataaaaaccccagaagaaaacctaggcaataccattcaggacataggcatgggccaagagtttgtgactaaaacacaaaaagcaatggcaacaaaagccaaaattgacaaatgggatctaattaaactacagtgcttctgcacagccaaagaaactgcatcagagtcaacaggcaacctacagaatgggagaaattttttgcaatctatccatctgacaaagggctaatatccagaatccacaaagaacttaaatttacaagaaaaaaagaaatatccccatcaaaaatggacaaaggatatgaacagatgcttctcaaaagaagacatttatgcagccaacaaacatatggaaaaaagcttatcaacactggtcattagagaatgcaaatcaaaactacaatgagataccatctcatgtcagttagaatggtgatccttactaagtcaggaaacaacaggtgttggtgagaatgttgagaaatatgaaccctcttacactgttggtaggagtgtaaattagttcaaccattgtggaagacagtgtggtgattccttaaggatctagaactagaaattccacttgactcagcaatcccattactgggtatatgcccaaaggattataaaccattctactataatgacacacgcccatgtatgtttatgtggcaccgttcacaatagcaaagacttggaaccaacccaaatgcccatcaatgatgtactggataaagaaaatgtggcacatatacaccatggaatactacacagccataaaaaaggatgagttcatgtcctttgcaggaacatggatgaagctggaaatcatcatcctcagcaactaacacaggaacagaaaaccaaactccacatgtttgcactcataaatgggagttgaacaatgagaacacatggacacagggaggggaacatcacacatgggacctgttggggcacggggggccagcagggggacagcattaggacaaatacctaatgcgtgtggggcttaaaacctagatgacaggttcataggtgcagcaaaccaccatggcacatgtatacctctgtaacaaacctgcacgctctgcacatgtatcctggaacttaaagtaaaataaaagaaaatttaaaaaatataaagtttatcgatcacttgattataacaacttcatttcagagatcctccaccaaacaagaaaacttttcctataatttaattcatttagctattaaatgatacgctgggcctaatcaatatcaaattaaataggttaaatttgcaggatgattagagatgagggcatttagttcctaaagaagaaaattcattttaaaaaaggtacagaagaaaaaaactccacttatcaatttacactttcttgtttgccttacctgggatttatatttaaaataaaagtttttggccaggcgcggtggctcatgcctgtaatcccacaactttgggaggccaaggctggtggatcatctgaggttgggagttcgagaccagcctgaccaacatggaggaacctgtctctactaaatatacaaaattagctggatgtggtggcacatgcctgtaatcccagctacctgggaagctcaggtggagaatcacttgaacctaggaagcagaggttgtggtgagctgagatcgtgccattacactccagcccaggcaacaagagtgaaactccatctcaaaacaaacaaataaacaaaaaacaacaacaacaaaaaacaacaacaaagttttcatttaattttttaacaaactaatctatgttaatttgatattagtttgttaacataacaaactaataatatgttaggcatattattcatttatatttgttttccttctcataaaacacattctgctcttacatttattttcttaaatacatgaattcaccaacagtctctttggttcctctctactggttcaacacatgactctttcagctattcattatatataaaaagctttgaaatctccaactattcttgccctttccatctcagtgccttgctgtctactgactttgcagactgatgtgattccctctgaaacatgaattattaggtttttagaaaatgcctttttgttctttccaaagtaaaagacaaataggctgggaatgtaaatttagcatttgaacaaccattatttaaccagctaggttgtaatggtcaactcaggattaatgtaaaagtgaagtgttgattttatgcatgccgaactcttttttgctgttaagggaatttgtaggtaagataatttctaaactactattatctgttaacaaatacagtgttttatatctaaagtttaatagtattttaaattgtttctaattatttagcctcaccctgtgatcccactttcatcctgggctgtgctccctgcaatgtgatctgctccattattttccataaacgttttgattataaagatcagcaatttcttaacttaatggaaaagttgaatgaaaacatcaagattttgagcagcccctggatccaggtaaggccaagatttttgcttcctgagaaaccacttattctcttttttttctgacaaatccaaaattctacatggatcaagctctgaagtgcatttttgaatactacagtcttgcccagacagccttggggtgaatatctgggaaagacggccaagccctttattttatgcatgggaaataaatgcctcaatataggcctgatttctaagcccattagctccctcatcaatgttttttctgctaaactccaaagccctgtttctgtaaagtactttgttgacagccctaaagcgtgctcatagcactccatggatatccaggcactttggaggctcccattactcacaagacttgtccttcaattaacactttgtcgtattatgtggcagaaatatcctaatttaaaagacattatctccttctagtagggagaatatttgggaccatagaagctgccaagaaacactgaatagggcaggggtgtttgatatctcagttgggatcctagctgatgagatagctgggttaggaatgacaaaattattggttttatggtgtatgaaccataaacagacatcacacttataccctgtgctgagctggcatgttttattctctgcctaaataataattgtgtgattttatagaagtcatttaactgctctggtgcacagttggaatttgaagtatctttgagcccctcccacttctaaaatactaattccatttcagaggctgcttgatagaaatcaatatagtagggactagctttgtactatcaatcaggttgtccaaattcttttaacctatgctgtcatctacaaaacgtgaatgtagtaattcatgccatcttatatttcaagattatagagaagaattgtaaaaagtaacagaattaacataaagatgcttttatactataaaaaggaggtctgagtctaggaaatgattatcatctggttagaattgatcctctggtcagaattttctttctcaaatcttttataatcagagaattactacatatgtacaataaaaatttccccatcaagatatacaatatattttatttatatttatagctgtaatttacaaccagagcttggtatatggtatgtatgcttttattaaaatcttttaatttaataaattattgttttctcttagatctgcaataatttttctcctatcattgattacttcccgggaactcacaacaaattacttaaaaacgttgcttttatgaaaagttatattttggaaaaagtaaaagaacaccaagaatcaatggacatgaacaaccctcaggactttattgattgcttcctgatgaaaatggagaaggtaaaatgtaaacaaaagcttagttatgtgactgcttgtgaatttgtgatttgttgactagttctgtgtttactaaggatgtttaactggtcaatcagtaatgcttgagaagcactttaagtttttattgtatgaatgaataacaaaatagaccactagctagactaataaagaagaaaaaagagaagaatcaaatagacacaataaaaatgataaaggggagatcaccactgagcccacagaaatataaactaccatcagagaatagtataaacacctctatgctaataaactagaaaatctagaagaaatggataaattcatggacacatacactctcccaagactaaacaaggaagaagtcaaatccctgaatagaccaataacaagttctgaagttgaggcggtagttaatagcctaacaaccaaaaaaagtccaggaccagatggattcacagccaaattctaccaggggcacaaagaggagctgacactattccttctgaaactattccaaataatagaaaaagagggactcctccttaactcattttatgaggctagcatcatcctgatacccaaaccgggcagagacataacagaaaaagaacatttcaggccaatatccctgatgaacaccaatgcaaaaatccacaacaaaatactgccaaaccaaatccagcagcacatcaaaaagcttatccaccatgatcaagtagccttcatccctgagatgcaaggctgtttcaatatttgcaaatcaataaatgtaatccatcacataaaaagaaccaatgacaaaaaccacatgattgtctcaatagatgcagaaaaggcctttgataaagttcaatacccttcatgctaagaattctcaataaactaagtaatgatggaacatatctcaaaatagtaagagctgtttatgacaaacccacagccaatatcatattgaatgggcagaagctggaaggattccctttgaaaaccagcacaagacaaggatgccctctctcaccactcctattcaacatagtattggaagctctggccagggcagtcaggcaagagaaagaaatgaagtattgaaataggaagagagaaagtcaaactgtctctattcgcagatgacatgattgtatatttagaaaacccctttgtctcagcccaaaatctcaagttgataagcaacttcagtatagtctcaggttataaaatcaatgtgcaaaaatcacaaccatttctatacaccaataatagacagacagccaaataatgagtgaactcccactcacaattgctacaaagagaatataatacctaggacacaaacaaatggaaaaacattccatgctcatggataggaagaatcaatatcatgaaaatggccactgcccaaagtaatttatagattcaattctatccccatcaagctatcattgcctttcttcacagaactagaaaaatctactttacattttatatggaacgaaagaagagcccacatagccaagaaaatctaagcaaaaagaacaaaaagttcataatcactgggacattggagaaatgcaaatcaaagtcccaatgaggtaccatctcatgccagttagaatggtgatcattaaaaagtcaggaaacaacagatgctggagaagatgtggagaaataggaatgcttttacaccgttagtgggagtgtaaattagttcaaccattatggaagacagtgtgctgattcctcaaggatctggaacaagaaataccatttgacccagtaatcctgttactgggtatatacccaaaggattataaatcattctactataaagacacatgtgcacgtatgtttattgcagtactattcacaatagcaaagacttgggaccaacccaaatgctgatgaatgacagtctggataaagaaaatgtggcacatatacaccatggaatacagtgctgccataaaaaaggatgagttcatgtcctctgcagggatatgggtgaagctggaaaccatcatcctcagcaaactaacacaggaacagaaaaccaaacattgtatgttctaactcattaatgggagttgaacaatgagaacacatggacacatggaggggaacatcaacaccggggcctgtcagggggtgggggacttggggagggatagcattagaagaaatacctaatgtggatgacaggttgatgggtgcagcaaaccaccatggcgcgtgtatacctacgtaaaaaacctgcatgttctgcacatgtatcccagaacttaaagtataaatatataaatctacccaaggagaaacagaatgcacattccaggtgaaatggaatcaattactgacaaatatgaaaacataaaatatgccctgtgatgaagatgggtgtcattattgcacacagtttatttgagaatgggaaagaatgacttaacctaggtgggtttcctgcattcctgcaaattgaaataggccataaaatatttgcagtgagagtcagaggaggggtttcagataggttggaatgctctacatggaggtgcagaggtgggtgatgggaaagagtaggtggatggaagagggaaaggaagcctttattgagtgagaacaaaaatgatttgtacagataacagttggaatttagtgtctatcagataaggcgtaaacatcaatgccgttgtcatcgcaccattgttgaaaacgctattttttcccctattgaattgccttggcaaccttgtcaaaatccaattgactataaatgtgtgaaaggtttttttctgtgtgctctcaattgtactccattgatctatatgtctgtcgtaatccctatagtgcaccatcttaattactgtagtattgtattaatatcaagttattatatcaaatcaaggagtgtgagtctttgttgttctttttcaatacgttttcactattctgggtcccttgaatcttcatatgaaatttagaatacacttgtcaattttctcaaaggagccaatggggattttgacacgattgcattaaatcagtagatcagggaattatgccatttttaaaattgaagtgaaattcacacaatatacaattaaccattttaaagtgtagacttgagtggtatttagtgtattcacaatgttgtacaaccaccagctttctctggtttcaaaatgtttttattacttcacaaaaacatatcatattcattaaataatcactccattcctccaacccatcatgtaattacctctaatcttctttctgtttctatggatttgcctgttatggatatataaaggactcacagcatatgtaacctgttatgtctgagtcctttcacttataatgttttagaggctcatctaagttgcaacatgtatcagtacttcattcttttttgtcgctgaaatatattttatttttccatgcacatatatcacaatttgttattcatctgtttatggacatttgcattgtttccaacctttggctcttatagataatcttgctttgatcatttgtgtatgtttctttatgggcatattttcatcattcttgggtatattctcaggagttgaattgctgggtcaaatggtaattttatgcttatcttcttgtatataagagccaatcttttctacagtgaatgtggcattttatattccttccagcaatgtagaaggatttctattttccacatagttgctaatacttgtaactttctgtatttattgaagccatcctagtgaatatagagtgttatctcattgtggttttatttatttattcatttatttagagacagagtcttactctgtcacccaggctggagtgcagtggcatgatctcagctccctgcaacttccacctcctgggtttacacaatcctcctgcctcagcccccagagtagctgggattacaggcatgtgtcaccatacctggttaattgttatatttttggtagagacgggttttctccactttggccaggctggtctcgaactcttgacctcaggtgatctgcccatcttggcctccctaagtgctgggattacaggtgtgagccactgcgcccagctctcattgtggttttaacttgtgtttaatggccaatgattttgaacttcttttaatatattattacccatttgtatatcttctttggataaatgccattcaagtacattttctgtttaaattaagttgactttatttttctttttaagctgttagaatgatttatgtattcaaaacattaaactcctacatatacataatatgaagatatttcctcccattctgttggttgtcatttcacattctcaattatattcttgctgcacaaagtttaattttgatgaagtttggtttatctatctttccttttgccactctggtatcaaatttataaatctattgccaaatatgaagtcatgaagatttacccctacattttattctaagagttttatcgttttagctcttatatttaagtttttccatccattttcagttatatttttcatttggagtgaagtaagggagatctcagcttcattcttctgcatttcgctgtcctgttgtctcatcaccatttgttgaagagactctttcctcagattgaatggtctaggcacccttgatgaaagtaaatttgccatagatctttaggtttatttcgtgatttcagttttattccatttgtcttgatgtctatctttatgctagtaccacactgttttgattattacagtttgtagtaagtttgaagttggaaactgagtactcactgatacagaaattaagtagaaattacttaggcaaatagtaagcatttgggagtcctcagtaaggtttttctttatactggaaagcagccccaaatcattttctaacaaagagcagcttgtaaaatcgagctgcagacatacacaaggaagctggaaacttgcacgagtgaaagctggtagtaaagaactacctgtgaccaggcaagttcaaaatggcggctccttccccacccactatgtaaatgtcacacctgattaaaccaatctctgggccatacgtaaatcagacactgcttcctccagcctccctatgcaatctgctgtggtccacctccttcccccttttccgatgtccctctctttcacaagaagctgcttttttctctcctttcttctattaaactttctgctacataacccactcagatgtgtccgtgtcctaaatttttctggggcatgatgacaaacctgagggtgtatatcccagacaacgtagctgcttcatcaccatgtagttgcatattaattgaacaatcaactttcccatttctggaaaaaagaccattggtattgtggtagggattgcctgagtttttagatcactttgaggagtactgccatcttaacgatattaagtcttccaatccctgaacatgagatagttttcaatttatgtaggtattagatattcttttttcttctgttgcaagggtctggtttagtttaaaaggcaagtttatcttaaatttttttatttagttatgaccattgaggattttaaaatgataccatatgaaatgccttcttttaaaaaaaatttcaacttttatttatttatttatttatttatttttattatactttaagttttagggtacatgtgcactatgtgcaggtctgttacatatgtatacatgtgtcatgttggtgtgctgcatccatgaactcgtcatttacattaggtatatctcctaatgctatccctccccactctgccaccccacaacaggccccagtgtgatgttccccttcctgtgaccatgtgttctcattgttcaattcccacctatgagtgagaacatgcggtgtttggttttttgtccttgagatagtttgctgagagtgatggtttccagcttcatccatgtccctacaaaggacatgaactcatcattttttatggctgcatagtattccatggtgtatatgtgccacattttcttaatccagtctatcattgttggacatttggcttggttccaagtcgttgctattgtgaatagtgccacaataaacatatgtgtgcatgtgtctttacagcagcatggtttataatcctttgggtatatacccagtaatgggatggctgggtcaaatggtatttctagttctagatccctgaggaatcaccacaccgacttccacaatggttgaactagtttacagtcccaccaacagtgtaaaagtgttcctatttctccacatcctctccagcaccttttgtttcctgactttttaatgatcgccattctaactggtgtgagatggtatctcattgtggttttgatttgcatttctctgatggccagtgatgatgagcattttttcatgtgttttttggctgcataaatgtcttcttttgagcagtgtctgttcatatcttttgcccactttttgatggggttgtttgttttttatcttgtaaatttgtttgagttctctgtagatcctggatattagccctttgtcagacaagagggttgcaaaaattttctcccattctgtaggttgcttgttcactctgatggtagtttcttttgctgtgcagaagctctttagtttaactagatcccatttgtcattttggcttttgttgccattgcttttggtgtatgagacaagaagtccttgcccatgcctatgtcctgaatagtattgcctaggttttcttctagggtttttatggttttaagtctaacatgtaagtcttgaatccatcttgaattaatttttgtataaggtgtaaggaagggatccagtttcagctttctacatatggctagccagttttcccagcaccacttattaaatagtgaatcctttccccatttcttgtttttgtcaggtttgtcaaagatcagatagttgtagatatgtggccttatttctgagggctctgttctgttccattggtctacatctctgttttggtaccagtaccatgctgttttggttactgtagccttctagtatagtttgaagtcaggtagctttgttcttttggcttaggattgacttgacaatgcgggctcttttttggttccatatgaactttaaagtagttttttccaaatctgtgaagaaagtcattggtagcttgatggggatggtattgaatctataaattaccttgggcagtatggccattttcacgatattgattcttcctacccatgagcatggaatgttcttccatttgtttgtatcctcttttatttcattgaacagtggtctctagttgtccttgaagaggtcattcacatcccttgtaagttggattcctaggtattttattctctttgaagcaattatgaatgggagttcactcatgatttggctctctgtttgtctgttattggtgtataagaatgcttgtgatttttgcacattgattttgtatcctgagactttgctgaagttgcttatcagcttaaggagattttgggctgagatgatggggttttctagatatacaatcatgtcatctgcaaacagggacaatttgacttcctcttttccttattgaataccctttatttctttctcttgcctgactgccctggccagaacttccaacactgtgttgaataggagtggtgagagagggcatccctgacttgtgccagttttcaaagggattacttccagtttttgtccattcagtatgatattggctgtgggtttgtcataaatagatcttattattttgagatacgtcccatcaatacctaatttattgagagtttttagcatgaagagctgttgaattttctcaaaggccttttctgtatctattgagataatcatgtggttcttgtcattgattctgtttatatgctggattacatttattgatttgcctatgttgtaccagccttgcatcccagggatgaagcccacttgatcatggtggataagctttttgatgtgctgctggattcggtttgccagtattttattgaggatttttgcattgatgttcatcagggatattggtctaaaattctctttttttgttgtgtctctgcccggctttggtatcaggatgatgctggcctcataaaatgagttagggagtattccctttttctattgattggaatagtttcagaaggaatggtaccagctcctccttgtacctctggtagaattcggctgtgaatccgtgtggttctggactttttttggttggtaagctattaattattgcctcaatttcagagcctgttattggtctattcagagattcaacttcttccttgtttaatcttgggagagtgtatttgtcgaggaatttatccatttcttccagattttctagtttatttttgtacaggtgtttatagtattctctgatggtagtttgtatttctgtgggatcggtgatgatatccccttcatcattttttattgcgtgtgttggattcttctctcttttattctttattagtcttgctaacagtctaccaattttgttgatcttttaaaaaacctgctcctaaattcattgattttttgaagggttttttgtttccatgtaattgagtttccattgtttccatggaatgcaaaaattccatgttttgagtgagtttcttaatcctgagttctagtttgattgtgctatggtctgagagacagcttgttataatttctgttcttttacatttgctgaggtgtgctttacttccaactatgtggtcaattttggaataggtgtggtgtggcgaaaagaatgtatattctgttgatttggggtggagacttctgcagatgtctattaggtctgcttggtgcagaactgagttcaattcctggatatccttgttaactttctctctcgttgatctgtctaatgttgacagtggggtgttaatgtctcccattattattgtgtgggagtctaagtctctttgtaggtctctaagcacttgctttattaatctgggtgctccgttattgggtgcatatatatttaggatagttagctgttcttgttgaattgatccctttacctttatgtaatggccttctttgtcccttttgttctttgttggtttaaagtctgttttatcatagagtaggattgcaacctctgcctttttttgttttccatttgcttggtagatctttctccatccctttattgtgagcctatgtgagtctctgcatgtgagatgggttttctgtgtacagcacaccgatgggtcttgactctttatccaatttgccactctgtgtcttttaattggagcatttaacccatttacatttaacattaatattgttatgtgtgaatttggtcctgtcattattatgttagctggttattttgctcattagttgatgcagtttcttcctagccttgatgatcttacaatttggcatgcttttgccatgggtggtaccagttgttcctttccatgtttaatgcttccttcaggagctcttttagggcaggtctggtggtgacaaaatctctcagcatttgcttgtgggtaaaggattttgtttctccttcacttatgaagcttagtttggctggatatgaaattctgggttgaaaattcttttctttaagaatgttgaatattggcccccactctcttctggcttgtagagtttctgccgagagatcagctgttaatctgatcggcttccctttgtgggtaacccggcctttctctctggctgcccttaacattttttccttcatttcaactttggtgaatctgacaattatgtgtcttggagctgctcttctcgaggagtatctttgtggtgttctctgtatttcctgaatttgaatgttggcctgccttgctagattggggaagttctcctggatagtatcctgcagagtgttttccaacttggttccattctcctcgtcactttcaggtacaccaatcagatgtagatttggtcttttcacataggcccatatttcttggaggctgtgttcgtttctttttattcttttttctctaaacttctcttctcacttcatttcattcatttcatcttccatcacttataccctttcttccagttgatcaaatcggctatagaggcttatgcattcatcacgtagttcttgtgccatgattttcagctccatcaggtcctttaaggacttctctgcattggttattctagttagccattcatataatcttttttcaaggttttttacttctttgccataggttcaaacttcctcctttagctcagactagtttgattgtctgaagacttctctcaactcatcaaagtcattctccatccaactctgttccattgctggtgaggagctgtgttcctttggaggaggagaggcactctgatttttagaatattcagtttttctgctgttttttccctgtctttgtggtttcatctgcctttggtctttgatgatggtgacatacagatgggattttggtgtggatgtcctttctgtttgttagctttccttctaacagtcaggaccctcagctgcagtctgttggagtttgccagaggtccactgcagaccttgtttgcctgggtatcagcagcggaggctgcagaacagcggatattggtgaacagcaaatgttgctgcctgatcgttcctctggaagttttgtctcagaagagtacccagccttgtgaggtgtcagtctgcccctaatggggggtgcctcccagttaggctacaaggggatcagggacccacttgaggaggcagtctgtccattctcaggtctcaagctttgtgctgggagaaccactattctctccaaagctgtcagactgggacaattaagtctgcagaattttctgctgccttttgtttggctataccctgaccccagaggtggagtctacagaggcaggcaggcctccttgagctgcggtgggctccacctggttcgagcttcccagccgctttgtttacctactcaagctttggcaatggggggcacccctcacccagcctcgctgctgccttgctgtttgatctcagactgctgtgttaggaatgagtgagcctcagtgggcataagaccctctgagccaggcacgggatataatctcctggtttgccatttgctaagaccatcagaaaagcacagtattagggtggaagtgaccttattttccagatgccttctgtccttggctaagaaagggaattctctgaccccttgcacttcccaggtgaggtgattcctcaccctgcttcagctcaggctccatgcactgcacccactgtcctgtacccactgtctcacaatccccagtgagatgaacccagtacctcagttggaaatgcaaaaatcattcatcttctgcatcgctcatgctgggagctgtagactggagctgttcctattcagccatcttggctccaaatgttctcaacttttattttgaagtgcacgttcatgtgtcttacataggtatattgtgtgatgctgaagtttagggtacaaataatgccatcacacaggtagtgagactagtacccaataggtagtttttcagcccttgcctttatatctctctaccctctatagtaattccttgtgtattttttccatctttgtgtcccacttttatatgagaacatgtggtatttggatttctgttgctgcattaattccctcaagataatggcttccagctacatctatgttgctgcaaagacatgattttttttaatggctgcatagcatttcatggtgtatatacaccacattttgtttatgtgacacatgattggttggttctatgtctttactattgtgaatagtgcaggaatggacatactagcacgtgtcgttttggtagaacaatttgttttcctctgggtacatactcagtagtggaattgctgcatcgaatggtagttctgcttttagttctttgagaaatctcaaaactggtttccatagtggctgaactaacttacattcccaccagtagtatataagtgttctgttttctctgcagtctcaccaacatctgttattttttggctttttaatcatatccattttgattggcatgagatgatatctcattgtggttttgatttgcatttctctgatgattagtgatgttgagtgttttctcatatgcttgttggccatgtgtgtgtcttctttggaaggacatatgtcctttgcccactttttaatggggttacttgttttttaacttgttgaattgtctaacttccttatagattctcgctattgaaacattgttggattcacagtttgcaaatattttgtcccattctgtaggttgtctgtttattctgttgatagtttctcttgctgtgcagaagctctttaattaggtcccacttgtcaatattcattttggttacaattgcttttgaggagttattcataagttctttgctaaagcctgtatccagaatgttattttatagatatttttccatcagattcttatagtttgaggtcttaaatttagatcattaatccatttcgagttaattattgtatatggttcaaggaagtgtttcagtttcattctgcatatggctagtcagttatcctcattcaatttactaaatagagaattctttcctcattgattattttttgtcaactttgttgaagatcagatggctataggtgtgtggctttatttctggcttctctacttctgttcaatttgtgttttgtaccagttacatgctctcttggttactgtagcttacagtatagtttgaagtcaatgtgaagcttcccactgttctttttgtttaggattgctttggatttgggctcttctttggttccatatgaattttagaataaaataatattggtagtttgataggaatagcattgaatctgtagatagctttgggcagtctagccattttaatgatattgattgtttcaatccataagcctgaactgtttttccatttgtttgtgtcatctatgattttgttcatcagtattttgtagctctccttgtagagacctttttgccccctttgttagttgtattcctaggttttttcttgtggctattgtaaatgggattgagttcttgattggctttcaggatgaacatttttggtgtttaaaaatgctacagatttttgcatatttattttgtgtactgaaatctcactgaagttgtatgtcagttccaggagtttttggaaagttctttagggttttctaggtctgaattgggtcttctaggtctgagatgggtcttctacttctactagtaggagatgggccttgcaatcttgaagacagtagaaggatgggtcttatttttaatccaacttcctactctttgccttttatgtggagcatttagactttatcttcaatgttaacactgatatatgaggttttgattctattgtgaagttgttagctggttgttttgtagtttctattgtgtgattgctttatagagtctgtgggctatatacttaagtgtgttttgtggtagcaggtattgttctttcacttccatatttagaactcccttaatgatctcttataaggctggtctaatggtaacagattttcctggtagttacttgtttggacaagattgtatttcttccttgattttgaagcatagtttggcaaaatataaaattcttttttgtaatttttattaaaatgaatgttgaaaataggctgagcatccttttagcttgacaaggttctctttgtatgtgatctgatttttttctctagctgcctttaaaattattttttagccttgactttggacagcctggtgagtaaatgccttggtgatgttaattttgtatagtgtctcacatatattccctgggtttattgtatttggatgtctacctttctagcaagtttgggaaaattttctcaacttattagcccaaatgtattttctagattgtttactttttcttctctctcaggaatgccaataattcctaggtttactccttttaaataatcagatatttcttgaagactgttcatttattaaaattattttttctttatttttgtctgacttggttagttcaaaagactggtgttcaagctctgaaattggtccagtctattgataaacgcttcaattgaattctgaaattccttaagtgactctttcaattccagaagctttgattgatttctttttaagatgtttacttctcgctccatttcctggactgctttagtagtttgtttgcattaattttcaaccctgccttggatcactgagcttacttgcagtccatattttgaatagtttatctgtcatttctgagttgccagtttggttagggttcattgctggggagttcatgtgatcctttggaggttttacgacattcagacatttcatggtgccagaagtcttatgctggtttcttcttatttggagaggctgccgcttctgatttttgaaattatttttgtgcagatagaattgtttttctctccctatttttgttctttcctttttctcttccccttcctatgggatgtgactataaagtatgttgggtagggcctttgacttggattctatagctgtgttcacttctgtgggtagttttatattggcctgtgcagtttgacatacatgtcagtagatggcacttatgagcaaaagccagctgtgactaggacaacttgatatagcacagcttgatccttgttttctgggggaacttctctgtttcctcagataatctgttcatctgtggaattcagagtagtctgggctccctgctgagccccagggggataaagatcggtgtcactggactgggcagtcctgtctacaggtcccctaatggcaggcactagcaccagcactgagagacaactgatttttgcattgatcttgtaccctgaaattatgctgaaatcatttattagctctacttattttctatctgtattgcatgagatttttctatatagagagaatcatgtttcagtcaaatacacatgatttgaatttttcctttcctatttgaatgtgttttattttatttcttgcctaattgctctggctagaacttccaatactatgtttaatagtagtaaaaatggacatccttgttttttttcttttctttctgattttaagttacaagttttagtctttcacaatttagtatgctttagctttgcagttttcataaatatgctttattatgataaaggagttttatttcatttatagttttctgagtgtttttgttatgatgggtattaaaagttgtcaatttttttttctgcatctaatgagatgaacatgattttctcttttattctgatatggtgtagtgcactgattgactttcttgttgaaccacttttgaatttctgggataaatctcacttgcttattgtgagatttatttttataatgtttattattataattttttaattttgtaaaaaattgttgcaaaatacacataacataaaagtttctgtattaatcattttaagtgcatagtattttggtattaattacattcacattgttgtgcaaatgtcactgccatacatctgtagaattcttttcatcttgcaaaacagaaactttatacccatttaataataactcttggccgggcattgtagatcatgtctgtaatcccagcactttgggaggttgaggtgggcagattggatgagctcaggagttcgagactagcctgggtaacatggcaaaaccctgtctctaccaacaaagcaatcaacaaacaaaatgaaagtaacataatttcctcaactgtgcaaactaattcatattaataattccatgaaatgtgtccatagtaacacaagagcagaagatgggccttgtaaaggtggcccaccacattatttgaggtctttgtcagtcttatctgccagatactgtgtggactaactgcagttaaaattcccattcccttatcacttgccctgaaatttatctgaaatcaaagggaatgggttgcccaaagagaagtgtccagagacgtggatgatgcgacaagaaatgttgtagaaccacacccccacctcaaatgataactctacatttctcccttccaccaccccatggcaaccaacattctactttgtgtctctataaaatcgagtatgctgggtacctcataaaagtggaatcattacatatttgccttttgtgactggtttatttcacttagcctaatgttatgttctcagggttcattcatgtttttgcatgtgtcagatttttcttcctttctaagggtgaataatattccgttgtatgtataaaccaagtttgcttacccatttatctgttgatgggcacttggattactttcaccttttgactttttgagtaatgctattatgaatatgggtaaaaaaatatctctttgatgtgctgctttcaattcttttgggtataaataacccaaaagaataacccaccacgcctggttaattttttgtatctttagtagaaactgagtttcaccatgttggccaggctggtctcaaactcctgaccctgtgatccacccacctcagcctcccaaagtgctggaattataggtgtgagccacgtcgcccggcctacatttattgatttgcatatgttgaaccaggcttgcatcccagggatgaagccaacttgatcgtggtggataagctttttgatgtgctgctggattcagtttaccagtattttgttgaggattttcgcatggatgttcatcagggatattggcctgaaattttcttttttttgttttatgtctgccaagttttggtatcaggatgattcttcccttataaaatgagttaggaaagagtgcgtctttttctactgtttggagtagtttcagaaggaatggtaccagctcctctttgtacctctggtagaattcggctgtgaatccttcaggtcctgggctttttttttgcttggtgagctattccttgctgcctcaatttcagaacttgttattggtctcttcacggattcgacttcttcctggtttggtcttgggagggtgtgtctaggaatttatccatttcttctagattttctagtttatttgcatagaggtgtttatagtattctctgatggtagtttgtattcctgtaggatcagtggtgatatcccctttatcatttttttgttctctctatttgattcttctttcttttcttctttattagtctggctagcagcctattttgttaatcttttcagaaaattagctcctgtattctttgatattttgaagggattttcctgtctctatctccttcaattctgctctgatcttagttattttttgtcttctgctaggttttgaatttgtttgctcttggttttctagttcttttaaatgtgttgttagggtgttgattttagatctttcctgctttctcctctggacatttagtgctataattttccctctaaacactgctttagctgtgtcttagagattctggtacactgtgtccttgttctcattggtttcaaagaacatctttattttgccttcattttgtcatttacccagtagtcattcagagcaggttgttcagtttccatgtagttgtgcagttttgagtgagtttcttaatcctgagttttaatttgatggcactgtggtctaataggttgtttgctttaatttctgttcttttgtatttgctgatgggtgttttacttccaattatgtggtcaattttagaataagtgtgaagtggtgctgagaagaatgcatattctgttgatttagggtggagagttctttagatgtctattatgcccgcttggtccagagcttagttcaagtcctggagatcctagttaaccttctgtctcattgatctgtctaatattgacagtggggtgttaaagcctccatctattattgtgtgggagcctaagcctctttgtaggtctttaagaacttgctttatgaatctgggtgctcctgtattgggtgtgtatctatttaggatagttagctgttctcgttgcattgatccctttaacattatatgataccacccctttttttaatctttgttggtttaaagtgcgttttatcagagactaggattgcaacccctgctttgttttgctttccatttgcttggtaaatattcctccatccctttattttgagcctatgtgtgtcttttcacgtgagatgggtctcctgaatacagcacattgatgggtcttgactctatccaatttgccagtctgtgtcttttaattggggcatttagcctgtttacatttaaggttaatattgtgtgtggatttaatcctgccattatgatgctagctgattattttgccttttagttgatgcagttttttttatagtgttgacggtctttacaaaatttggtatgtttttgcagtggctgttcccagttgatcctttccatatttagtgtttccttcaggagctcttgtaaggcaggcttggtgatgacaaaatccccttgtggtgatgggcttccctttgtggtaacccgacctttctttctggcttcccttaacatttttcctttcttttaaccttggtgaatctgacaattatgtgtcttggggttgcccttcttgaggagtatcattgtgggtgttttctgtatttcctgaatttgaatgttggtctgtcttgctagattgtggaagttctcctggataatatcctgaagaatgttttacaacttggttccattctccccatcactttcaggtacaccaatcaaacgtagatttggtcttttcacatagcgccacatttcttggaggctatgttcatttctttttattcttattttttaacttttttcttcacattttatttcattaagttgaccttgaatctctgatatcctttcttctgctttatcaatttggctattgatatttatttatgcttcacaaagttctcattctgtgttcttcagctccatcaggtcactcatgttcttctctagttagcaattcgtctaacattttttcaaggttcttagcttctttgcaatgggttagaacatgctcctttagctcagtggagtttgttattacacaccttctgaagcctacttctgtcaattcatcaaattctttctctgtccagttttgtccccttgctggcaaggagttgtgattctttggaggagaagagatgttctggttttttaaattttcagcctttttgtgctgtttttttttttctcatatttgtggatttatctacctcttgtctttgatgttggtgacctttgaatgggttttttgcgtggacatcctttttgttgatgttgatgctattcctttctgtttgctagtttttttcctaacagtgaggcccttctgctgcaggtctgctggagtttgcttgaggtccactccaaaccttgtttgactgggtatcaccagaggaggccacagaacagcaaagattgctgtgtgtttattcctctggaagcttcatcctagggggacacttgccagatgccagccaaagctcttttgtatgaggtgtctgttgacccctgctgggaggtctgctgttctctttagagccagcaggcaggaacatttaagtctgccgaagctgcacccactgccaccccttcttccaggttctcagtacagtgagatgggagttttatctataagcccctgactgggactgttgcctgtctttcacagatgcaactgctcagagagtaggaaactagaggggcagtatggctacagtggctttgcggagctgaagtggactccacctagtcctagcttcctggaggctttgtttacactgtgaggggaaaaccacctactcaagcctcaacaatggcagactcccctcacccccccaccccccccaagctcgaacatccccagtcaacttcagactgctgtgctggcaaacagaagttcaagccagtggatcttagcttgctgggctccatgggggtgagatcccctgagctagatctcttggctccctggcttcagtcctctttccaggggactgaatggttctgacttgctggtgttacagcaccactggggcataaaaaaacccctccagctatcttggtgtctgcccagatgaccacccagttttgtgcttgaaacccagggccctggtggtgtaggctctgaagggaatcttctggtctgtgggttgtgaagaccatggaaaaactgcagtatttgggccagagtgcaccgttcttcacagcacattccctcaaggctttccttggctatgggagggagttcaccaatcccttgggcttccaaggtgagacaacattcctccctgcttcagtttagcctccatgcactgcacctactgtctaaacattcccagtgagatgagccaggtacctcagttggaaatgtagaaatcacctaccttcttcattgatctcgctgggagctgctgactggagcttttcttattcagtcatcttgccagccaccctcctgattgagtttctttaaggtaattattttgaattccttttttgaatatttgtggattttttttcattgaggtctgttatttgagagttattatgtccctttggtggtgccatatttctttatttttcatgttgtgtctctgaatttatgtctatgcatgtgatggaacaattgctattccaaaatctctagagtgaatttcatagagaaagacttttatctgaagttgagtgtttgtgtgcaggtgacgaagagtgggtaactcagtttttgatagatgcattgtgatagtatctgtgtagtttctctagctatggccaatatcagcaataattttgggtgcctcagtggcctaggctgtagaagtttgcagcagtatcaggagcagtgtaggttgttaatgtccttagtgtcaaagtatttgggcgtcctcctatttttattttcctaaaattggggtgacttagcctaagggattccttttggtgtcatctctgacatggcattaactcagcggcattggtgctgggttacaagtacagatccttgaagttgtcatagaagcatcattctagactcagggtcttttaatcatgtattgtgacacctgggtcttgcggtgcaggttcactctctgtggcagtgttgaatgcagattacccacagaaccaaggtctatgactctagcacaccttagcagctgaagcccacagactgagttgtggctgtgaatctgtttctgagggtgaggtgcaggaaaatgccgtggcctgcctctgatgtagaaggggtgctctttagatttgagcccagcaagtagaatatggctactatcattaataagataggatatactaccttattaatgctaagtaaccaagctcaagtcaagagatggaaatgttaatactggtttgtgactgcactgttcttcttacttaagagtaattttcaacatggcaagcttagaaaactgtgtgaagctgatgttaccaagggagaggactgtctttgtctacacatgttgagagaatctagtctatttcagtggtgttgattacacaatattcaacatgacacacatcacttggagactctaaaagcatcattaatttattgctgctggccttggggctggttaaaaagtaatacgttttttatattgatgatctctttcaactaagtattccttatccattgctttctttctcccaacttccaaattatgagaactccagtctctaagccttggcatatgcagtatccttactctctcctttatcccctgtggcaattaatccctttattctccatcttcatcattgttctttctcttcactttgtatatttttgtttattcctgcactactgcaccctagaacaagttgtctgttgcctcccatctagattataatagtgtgggcccatcttgtcattgtaaacccattctcttcctctataatttatcttaggttttgctgtcatattgcttttttaatatttgtttttacaaaatttcaactttataatgaatctgggggcaatattgagtccatgtacctttctgacagaaaaatataattgcagactcttgattcaggctcacagtgtctaatgatatggccccaatttacgttttctattaatttagattgtggttgtctacaggtaataatggctttaacacataatgtctttatttatctcaaatacagggattctcttggtggggcaatctaggataatacagcagccccaaagcagcagagagtcaagtgccttcctttttcccactaaatttagtatacagaccttcattttgatgattaaatcccaggatggggtctactctacctcctacttcacatttgtgttttgagtatgaaagaggaaatagaggaaatggacctagagaccttctgcttatatattttagcaaaaaaaaatatgctgtgtgactcagctagctgcaaagagcctgatgaatggaatttttaggcaagcatggaataagggagtaggaaataaagtttgggcaagttggtctacagcctctgctatacaagcagtattttttttctagtactgtactttccagtttctatgttggtaactatataactatgtgaataattttgaattcactgtaatcaaatatgctggtaaataatttgtcagataattgcatcaaatcattcctaggaaaagcacaaccaaccatctgaatttactattgaaagcttggaaaacactgcagttgacttgtttggagctgggacagagacgacaagcacaaccctgagatatgctctccttctcctgctgaagcacccagaggtcacaggtatgatcagagatgataagttaattaattttcagaaaagattttgggaaggtgttgctagtgtcctccttcctgtttctcttagagaagcttcattatttaaacttttgtgcttccagctgtaatctgtttcaaactaatggtgattacaatgggatatcttggcctggcatggtggctcacacctgtaatcccagcactttgggaggctgaggtgggtggatcacttgaggctaggagttcaagaccagcctggccaacatggccaaatcccatctgtagtaaaaatacaaaacttagccaggcatggtggcacatggctgtaatcccagctactcgaggggctgaggcactggaatcaattgaacccaggtggtggaggttgtagtgagccaagattttgccactatactccagtctgggcaacagagtgagactctgtctcagaaagaaaaaaaaagaaaaaaagaaaaagaaaagataaaaggggcatctttgcacagtagaggaagataactgagagaaatgaagacagcatggcagtagcaaaagcagtagaactctggtccaatgtgtctggatttatggcaggaagagacaagataaattggcctgggattgcatgttggttttattatgagaaggccattttaaatagcaagtatattcttcaagataacttttctcattctcaaaatttcaggttcgaatgctggagtagggaaacttgaaactctccttattgaaggataaatggtaatcctaaaaatgtagtgatctgcctgagaaaattcctagtccaataagtactctaaaaagttagattcataagaaaggtgattctgtttactagaagaggtatataaagaatgttccatttaggcagaatatgtacctgagacagtttccatgaaactgttgttgggcaaaataagatttttttgaggaagtcaataattttatcttttatgaacaactttactttagaaatttacttttaaggacttttggttatgctgcagataagaaatattctttttttctcctatgtcagtatcccccattgaaatgacaataacctaattataaataagaattaggcttttttttgaacagttactagcctatagagttctagaagattttttgtcaaattttattatagattaaagggtacaaatacaggtttgttacataggtaagttgtgtaacactgaggcttggggtcccagctattccatcacactgacagtaaacatattacccaacagatggttcttcagcccacatctcttctctccctcccccatctagtgatcctcagtgtctattgttcccatctttatgttcttgtgtattcaatgcttacctcccacttataagcaagaacatgtggtatttggttttctgttcttgtattagattgcttaggataatggcctcctgcttcatctataatgctgcaaaagacataacttttgttctttcttatggctgcataacattccattatgtatgtactagtctgttctcatgctgctaataaagacatacctgagacagggtaactcataaaggaaagaggtttaatggactgtcaattccacacggctggaaaggcctcacaataagtctctgatagagacttattcactatcacaagaatggcatgggaaagtcaggcctccatgattaaattacctcacattgagtacctcccgtgacgtgtgggaattatgggagctacaattcaagatgagattttggtggggacacagcctaaccatatcagtgtatatttggtacattttccttatacaatccactgtcgatgggcacataagttgattccatttctttgctatcgtgaatagcactacatattggggtgaacatattggggtgtgtgtcttattgatagaatgaatattttgggggcatatactccatagtgggattgctgggtcaactggtagttctattttaagttctttcagaaatatccaaactggtttccacagtggctgaactagtttgcatacccaccaacagtgtaaaagcatttccatttctctgcaacctcaccagcatctgttgtttttggactttttaatattaataattgctattctgactggtgtgagatggtacctcattgtgattttgatttgcatttctctgatgattagtgatgttgagcattttttcataagtttgttggctgcttgtatgtcatctattgagaagtggctgttcatgtcttttgcccaattttaattgattttttttgttttttttttttgcttgttgatttgtttaagttttttatagattttgtctgttgatacatatttagattttggatattagacatttaggtcctttaaggtaggaagagtacaggaaatagtcaagaagactttaacaaatttctaaaaacagagagcatatagaggaatgatatatctgtacagagagggtaaacttataaccaaaaggtcagaagagaaaaatttatcaaggatgaaaagttaatcagtgtcccttaaatcctcccaatattggtatttggaagtaccgagggtcaaagatggtggagaatgaggctgaaaaaggaggctctccctgcctacgtttcctccacaactcttttcatcaggtaactgatttccttccacaagaagaaggaggctcactctctagagaaactgagcttaagaagccctgtactcagagacacacagcagtgccagaaaaggcatgaggtgtaggctagaaagacagattaggtacacatccactccttgaattcagagactcttagctcttttattcatcttccttcctaaaattcagcagctagctctatcctacagaaagggaactgatctagagaaatggcatttttcttttgccatcttaacagacaattctcttcaatgtccaacagagtgaatgaaatgaaaacatatactgctagatacagggttatggaatttcaggacatgagaattaaagggaaaatcacaaaaactttcagagctgtaccaggttatattgaaagaattagaattcagaattctcaagaagaactattaatattatcttgtatattaataaaaatagtgttttcagatgtgcatgtttgccaaaaatttttaccattttccctttctcagaaaaatactgaagaatgttcttcattcaaatgcctgaaaccttgttagagaaagtcctgagctccagcaatcaggaaacctcgtgtaggagaatgagagtgtcagggaggctgcctagcaccagacctagaaaacaactacttcagaacagacctgggggataattcagaagtgagatgagacagcaagaacaaaagagatgtgacagattttatgagagtttccaataactaaaaaggagtttcaaacatctgctggaacatttgtaaataattctaacttgggaaatggaaaattacaaattgaaataaagagacattgttaagcccaggaaagtacaaaaataaaatttaatcatagttgtcttaccagagaaccatatttgtgtagtcagaatgatgtaagcaatgaatactgatatcataaaaattgtcatctaaatatattctggaaaaagcagtgtggaaaagtgagtgtgtctatctgagggtgtgttcaaatatgaggggaagatggagattaaaattctcatctctcttaataaaaaattattaaatataatctacaaaaagataagtaagaattagaaacagagtatttaaaaatgtgaatgtatgttcagaagaagctgctagaatgttcaaaatggtagatttggaaagtgtgagaatgaagagaataccattgtgatttgtgacccctcccacacacagatgcaccaatacagtcatatatatgcataaatctgatagtataatttaacgtttaagcaacatatgttattttgatatgaaattaatctgtttttcaaagacagtaatttcatgactaaattatatgcttactttatgttttcaaacattttattatttttatttgtattaattatcatatatactaatgtatatgtatatacatatcttttaattttttttaatttttatgggtacaaagtaggtatatatcaatatgtttgggggtacatgagatgttttgatacaggcatgcaatgtgaaataagcatgtcatggagaatggggtatctattccctcaagcatttattctttgagttacaaacaattcaattacactctttaagttattttaaaacgtacaattaagttattattgactatagtcacccttttgtgctatcatatagtagatcttattcatctccacctcccctccccccacactaccctttcgagtctctggtaaccatctttctacactttatgtccattagttcaattcttttatttttagatcccacaaataagtgagaacatgctatgttcgtctttctgtgcctggcttatttcacttaacgtaatgatctccagttcccttcatgttgttgcaaatgactgaatctcattctttttatggctgaatagaactacattgcgtatatgtactacattttctttatacatttgtctgttgatgcatatttaggttgtttcaaagtcttagctattgtaaacagtgctgcaacaaacaagagtgcagatacctcttcgatatacctatttcctttcttttgggtatataccaagcagtagggttgttggatcatatggtcgctttatttttaggattttgaggaacatttaaacagctctccatagaggtcacactaatttgcattcccaccaacactgtacgagggtccacttatctccacatcctcactagcatttgttattgcctgtcttttggatataagccattttaactggagtgagatgacatctcattgtagttttgatttatatttctctgaggatcagtggtgttgaccacctttttgtatgcctgtaacccatttatatatcttcttttgagaaacatctattcaaatcttttgcccacttttggattggattattagattttttttctatagagttgcttgaatttcttatatattctgattactaatctcttgtcagatgaatagtttgcaaatatttctctccattctgtggattgtcttttccctttgttgattgtatctttggctgtgcagaagctttttaacttgatgtgatcccatttgttcatgtttgctttgaatgcctgtgcttgtagggtattgctcgaaaaatttttgcctagaccaatgtcctggagattttccctagtgttttcctatagtagtttcacagtttgaggtcttagacttaagtctttaatccattttgagttgatttttgtatatggcaagggatatgagtccagtttcattcttctctgtaggatattaaattttcccagcacatttattgaagagactgtctttcccccagtgtacgttcttggcacctgtgttagtctgttctcatgcctctaataaagccatacacaagactgggtaatttataaaggaaagaagtttaatggactcacagttccacatggctggagaggcctcacaatcatggcagaagatgaatgaggagaaaagtcatgtcttacgtggtagcaggcagatagctttgcaggggaactcacatttataaaaccatcagatgttgtgagatttagtcactatcatgagaaaaatatggaggaaaccacccccatgattcaatgatccctacctggcctcccccttgacttgtggggattatttcaattcaagatgagatttggggtggggacacagccaaaccatatcagcccctttgtcaaaaatgagttaactctagatacgtgaacttgtttctgaattctctattctgtttcattggtccatgtgtttgtttttatgtcagtaccatgctgttttagttagtatagctctgtagtttaatttgaagtgagataatgtgattcctccagttttgttccttttgcttaggatagttttgactattctgggtcttttgtgggtccatatacattttaggatttattttttctatttctgtgaagaatgccattgatattttgataggaattttattgaacctgtagattgttttgatagtatgggcactttaacaatattgatttttccaatccatgaacatgaaatatttttctgtttgttgggtcctcttaaatttctttcctcagtgttttatagttttcattatagagatctttcaattctttggttaaattaatcctaggtatttaaaattatgtatggctattttcaatgggattattttttaaatttctttttcttttttttcactgttggcatataacaacactactgatttttatgttgattgtgtatccttcaactttactgaatttgttcatcagttctaataattatcttgtagaatctttagtttttcctactataaggttatatcatctgcacacaaggatattttgacttcttcctttccaattttgatagcctttatatctttctcttgtctgattgctcttgctaggtcatccagtactatgatgaataacaatggtgacaatgggcatccttgttgtgttcctgatcttacaggaaagacttcctattttctccattcaggatagtactagttgtgggtctgtcatatagcttttttatgttgaggtatgttccttctatctcaagttttttttatgaattttcatcaagaagggatgttaaattttatcaaatactttttcagcatcaactgaaatgatcatatggcttttatccttcattctgttgatatgatgtatcacactgcttgatttgcacatgttgaaccattcttgcatccaagggataaatcccacttggtcattgtgaatgacctttttattgtattgttgaatttggtttgctagtgttttgttgaagatttttgcattagtgttcatcaggtgtattggcctgtagttttttttttttttttttttttttttgatgtgtcttagtctgattttggtatcagggtaatactggcctcatagaatgagtttggaagtattctcttctcctttattttttggaatagtttgagtagggtcggtattagttcttctttaaatgtttggtaaaattcagcagtgaagctagccagtcttgggattttctctactgggatgattttatttctcgtttgatctttgtgctggttattgcatgttcagattttggatttcttcctggttcaatcttgatgggtcatatttgtgtagggatttgtccatttcttctagattttccaatttattggcatatagttgctcatagtaaccaataattattctttgaatttctgcagtatcagttctaatgcctcctttttaattttttatttatctgaatctactctttttttttttcttagtctggctaacggtttgtcaattttgtttaacttctcaaaaaagcaactttttgtttcattgatcttttgttttgttttcttcacttaaattttatttatttctgctctgatctttattattccttttcttctactaattttggttttaatttgcttttgcttttctaattctttaggatgcatcattaaattgtttgtttgtcaattttctccatttttgatataagctcttgtagctataaacttccctcttagtactggtcttgctgtaacccctaggttttggtatgttgtgtttccattatcatttgtttcaagaaatttttcaattttctttttaatctcttcatgggtccactgttcatttatgagcatatttttaaatttccatttatttgtgtagtttccaaaattcctcttgttattggttgctggttttattacattgtggtcagagaagatgcttgatattatttcagtttctttgaatattttaagacttgttttgtgacctaacatacggtcaattcttgataacaatccatgtgctgtggaaaagaatgtgtattctgtagcagttggataaaatatcctgcaaatatctatgagatccatttgatctatagtgcagatgaatttcaatgtttccttgttgattttctatctggatgacctgtccaatgctgaaagtggggtgttgaagtctccaggtattattatattggggcctatctctctctagttctaattatatgtcttttatatatctgggtgctgcattattggttgcatatatatttaaacttgttccatcttcttgccaagctgaccactttatcaccaatagtgatcttctttgtgtctccttatggtttttgttttgaaatctactttgtctgttttaaatatagtaactcatgctctttttttcatttccattggcaggtactgtctcattcaattcctttattttcagcctatgtgtgtctttataagtgaagtgtgtttcttttaggcaacagattaataggtcttgtttttccatccaggtcagtaacaggtcagtatgtcttttgattggagattttattccatttacattcagtgttattattgataagtaaggacttacccatgcccctttgttatttgttttctggttgttttgtggacttctcttccttctttcatttcttcctgtcttcctttattgaagagaattttctccacttatatgtgtacagatttttcttaatatctggtttatggcagttacacatttgtgcatctgtaaccatcctctctttaagtttgcatatacttccagcactataatttaaatttataatgatgtttggataccttcatgattcatatacccctgaattgctacaacaaatgtgccatttttctccttttccatcagtttttacttgtgtcttatcagctaaagtccaggaagagattgaacgtgtgattggcagaaaccggagcccctgcatgcaagacaggagccacatgccctacacagatgctgtggtgcacgaggtccagagatacattgaccttctccccaccagcctgccccatgcagtgacctgtgacattaaattcagaaactatctcattcccaaggtaagtttgtttctcctacactgcaactccatgttttcgaagtccccaaattcatagtatcatttttaaacctctaccatcaccgggtgagagaagtgcataactcatatgtatggcagtttaactggactttctcttgtttccagtttggggctataaaggtttgtaacaggtcctagtgtctggcagtgtgtgttctccagatttattatctttcttcaagattggtttggctactcttaggtgcttatatttccaaataatttttaaaggtattagtttgtcaatttcccaaaaccttgggctggaatttctggcagggtgacactaaatttataggctagtttggaaagaactgaatcttgacacgttgaggctttccattcctgaatataattatgcttccaatttgtttggggtttcttttatttaaccaggaatgttgtgaatttgttgtcatggctttcgagtctttggttttccctagataattaatatttttgttgtagaacataaatagtttttatcattctgatgatgttaatctgtcaactttgctaaatttactagtcactattcgtaatttatttctggattcattgtaatttctgtgtatattatactgtatctgagttaatattgttttatttcttattttccatttctcatgggcttaatgtctctttatcacattcattattgcattagctagaatttctaggagagcattgaatagaattggtgacagtggggatccttgtttctcatttctaatctgcaggaagcagtggaagttttccatttcaatattgagaatgatgcttgaagtagattttggtagatattttttatcagattagagaagtttgctgtcatatatatatatgtcataattgtgtgtaaaatcttgtcaaatcaacactctgcatctatttatataattgtgtgttagtccatttccattgctataaaggaatatctttgactgggtaatttataaataaaagagtttcattttggctcatggctctgcaggctgtgcaagaggcataatgtgggcaggcatctactcctagtaaggacttcaggtagctttcaatcttcggagaaggtgaaggggaagcaagcatgtcacatggcaagagagggagtaagagaaaaaggagtagaagtgactttaaacaaccagctagtgtgtgaactaacagaatatgaactcacttattatcatgggaagaggtttaagccactcatgaagaattcacccccatgtcctaaatacttctcacaccagaacccacctccaacattgagaatcacatttcaacatgagatttggaggggacaaatatccacacaacatcagattatatatattgggcttacatttctcactaaatagaaataagtatgcacatagagatgaactggccttcttcatattgtttaggacttcagtgtttacattcacaagagatttggtttatagttttatttctcagaattttcaagatttttgatattaagattatgccagccttataaaactatgcaagaaatgtttcctaatgtgagactgtttttattgccgttccctctccccacttttcttcttgtgatcacttagttgtatctttgaaatgcctgataacttttggttaaataccagatggtatatgtaagaaattgcagaattgcagaggaggtttatattcttcaaagaaagattcattcctctcccatcggcagtcataatgacatgatacctgttgtcatgattcagaattggacataatgtgaatccagttgaaaattgagtgtcagtgttagcttagctctctgaggttctcctacctttggaagcttgagaccaatttttgtcttgacagctttgcagtgccttctatcacatggtttctgtatttatccagacactccatttgccatctcaaacctactcttttccaatcaaaaccaatatatattattagtaaaataaaaaataatataactgaaagttgtattttcaaggggaaaaagcaatgagacttggtaaggttgcaattactaatgtcatcttttgaagaagacagaattgataatttacttagagattatggggcttaccctagtggtcactgagttagtacaagagaaaagacttcaatgcactctgttttcacaaacacaggagataaccaggagactttcgcttctcaaaattagggtctgagggtaatggtaatgaaacttacttcttctcctataactaattaaatgagaaatatactgaagaatcaggcacgagttgccagtctccccagttcactgcatcagctttggtgacctcctggaggggaacgctgcatctgatgagctcatgctgtgcctgatgtcttttgagccctgagaagccagagcccaaggggattacccattgaatcccttcttcgtggaatagcccagtgcagaaaaaagcagcactgtgtggccaattctaccctctttacaaatcagatacatgtgttcttctgctacaggctggatccacttatctagctggagatgatagtctgagacaggagttggcaaactgtctctgtaatgggccagatagtaaatattttagacttttcaggcaatgtggtttctgttgcaattcttgacatctgctattgtagcatgatagcagtcacaaacaatctgcaaatgaatgaggattgatatgttccaatttttatagaaacaaatgtaaatttcctataaaatgtttgtttcaaaaatattgtttcttgtttgcatttgttcaatgtaagtacttttagctcacatactatacaaaaacaggtggcagggtggacttgtgcagggagtattttttattgatgcctaatataagacatccctgtccagtagaattttctgcaaagatgtgcgattgatttgtgcttttatgtcatatttaaagaatatttgtcagcacaagattccaaagactggctttcaactttcccagaatttttttgttttagctcttatatctagatcaatgacatatttcaaattaatttttatttcataatatgaagtaatagtggtcatgcttcaatgtctataaatttctacttattcaagtaacatttgttgaaataaatctgctttggtatcaataacattttaatatagtacttgtttataaatattcaagggaatatttttaaaaaacaaaattatagactatttatatgaaaatttagggggtagaatttttcctaacatttttattataaaattttttaaaataaataacattacacacacatatgtatatgtacatatggcagtgtgtatacatatctactctgatatctgtccatccatctatttacacctcaatacttcagtatgtatagcacaataacaatggttttctcctacataataatagcattcatactgtggagttattaatacaataatattatttactatacagcttttatttaaaatttcccaactttaaaataatattttaatcacttttttcttgcaattcactctccagtcaagaaataagcacatagtttcagtatcctgttactttccatctcctgtaatcaagaagagtccatttcctctgtttcctttcagtatgttgatctctgtgaagagttgagcaattagtcatttaaattttcctggggctcgttttgggtaattgttttctaaatattatattccagttatgactttggcaagaaaactacatagtattttgaatattctgctgaatcacagtggtgaggcaggggcacataatgtcacatatgccattattggttatgctaagatcctcacctaataagttggaatctgccagatctttccattgaaggggttctgctttttatgcgtgaatgatgaaaatctatggcatggtacttcaaggcagaacaccctgtttcccaagtcacacatccaatagttttatctttcattaatgatcctcatctgacctgatgatcttgacctgaatggttacaaataggtgatttttctaatttcatcattccttccgtatttttaagctaggattaatctgtaatgaatatctctcccatatctttaaatgaagacaaacaaactgcatggcaatgacaagaactcaatagttttatccttgccactacacttgttaccatcccagaagatgtcatttgaaattcaatcatatgtttattcacaaatgccctgtgaacagatactgtggccatttcccatgtcaacagagacttcaacttttagttatactctacacataaggttggtgaaaactgaagtgatggaatagagaagcaagtgtggacagccactagtttccaagcttgatgaaaaggaggacagattcagaaggttgcatccaagtatccaagtactcaggacttcaaatgtgattgcagggcactttagcaagattattgtcatgggccttaagttcatgactcttattacttggtctatccatctggaaatggtactgcccttctttggaacgggatttcctcatctgcacatcaaaagatttaactacatgattaccactgtttcttcaaccttcatggcttctttacagctcagttcatctatgtctcttgtttctagggcacaaccatattaatttccctgacttctgtgctacatgacaacaaagaatttcccaacccagagatgtttgaccctcatcactttctggatgaaggtggcaattttaagaaaagtaaatacttcatgcctttctcagcaggtaatataaatttatttccatttgtgtttcagggtacaagataacttttttgatccattggaacttacatgtgcctcctctgcagtggtacaattactctttgtacatgatcaagagcactgttctgaatgcctgtgtacaccctgctcatgatacatcctaattattgggccagattagtggactttggggagttaatccaattcttccaaattgagaaagctgaaatataggttggttgaattctgcctctaggtacaccagtgaggtacccaagaactcctcctggaagataaaactaattacattttcctcactagccatgaggaagttatctcactccagaacttcactgagtgtcttccacatggtgtccctcaccccctaggctgggcttgtaggataaaattatccacaaacacagaatagggtcttaaaaggctcacttctgagtttggaaagcagagtaaacagatcattgtagttcaataggactgaggctgtgatatggaaagaacaggctgttgggggttgggaggtagacggaaaagctgtctgcttcttgtactcttataccccaaagtgaggcataagtaatattttaatagcagtaaagacatttgagctacctcaaaggaggcagagaggatgaaaagaagagaagacagggctattaaaggagataatgagccacaggagcaggacattggctctaaataaaggatattagaacctttgccaaatgaccatggatgggatgagggggacattgggaatgtagcaggatactctgcagtgatgcagagcaccatgctgttcccctagtcatggccatgtatattggatgttggatctccatacttgaaatgtgtgtgctgagcatctggtgatagaatctccttcctttattctatgacctttaatgtctgctttatatctgccactgtagataccaagacaacaagaaaagaaaccttccttcaagcattcacatttagcacatgtattagtccactcttacattgccttaaagaactacctgagattgggtaatttatgaagaaaagaggtttaattcactcacagatccacaggctgtacaggaagcatggctgggagacctcaagaaacttgcaatcatggtgggaggcagagcggaagcaagcacatctttccatggcagagcagaagagagagaacaatgaggaaaggctacatacctttaaacaaccagatctcatgagaactcactcactatcatgagaacagaaagggggaaattatcccccatgattcaatcacctctcaccaggtatctcccccaacattgggaattacagtttgacatgagatttgagtaaggacacagagcccaaccatatcgcacactaataaataaataaataaatcagtaattattattctaggtgatccatgctgtctgtttcttctgccataacaaaatatccaagactaggcaattgataaataatggaaatttatttctcacagttctgaaggctgggagttccaagatcgatgtgtcagcaagttcagtgtctgatgtgggcctgttccttacagataatgccccctctgtatccttatatggcagaagggcaaaaaggcaaaaggggagaaatggctcccttgcatctcttgatgttattattttagcaaggacagagccctcctgacttattcacttcctaaaaggagccatctctttagtaatgttgcattgggattatgtgtcaacatatgaaattgggggaggcatattcagaccatagcacatttttcaatggaaatataatgttgaggaaacccagagaaggcaacattttcttgctcaaggagatgagaaagagggtaaaaaaggagataaaatttgacctatgtcctgactgtggtaatagaaaagttcatcttggctaaaaggagcagcatgatataaaatttgaaacctcatggtgtgttggagactgatgatgagtggctatgcctagagttgacagtatcggatttgaagagtgtaaggagtgatgtggatcatcagactggaaacagaatgtgagggtccagatcaatccattgggaccttatcctataggacatacagggaagccatttaaagttttaaagtgagaaggtgacatgtttagacatgtgctcctgaaagtacctagaggaaaaaaatctttggctgcatattgagccagaaatacaaagggaaatacagtatgttagcctcctcctctaagcccttctcagttcaacccactggacaagaaatgtatgtttctaaagaaagattgatgaagacatttaaagtctcttgaaagattttaataaagtgcttggcatgtagctggtactcaacaaatatttgttgaatacagggtgcctgttaagatctgatattaggtgaagagtaagtatgtccattcatttttcagttgcctatacatccatccattcatccatttatccatccactcatccatccattcattcatgcatgcacccatccacccatctatctcttcatctcttctacgatacactgaacagttattgcatattctgtttgtgccagttacagagacagtgtttgtcactgtcacagttacgcatgaggagtaactgctctctgtgtttgctattttcaggaaaacggatttgtgtgggagaagccctggccggcatggagctgtttttattcctgacctccattttacagaactttaacctgaaatctctggttgacccaaagaaccttgacaccactccagttgtcaatggatttgcctctgtgccgcccttctaccagctgtgcttcattcctgtctgaagaagagcagatggcctggctgctgctgtgcagtccctgcagctctctttcctctggggcattatccatctttcactatctgtaatgccttttctcacctgtcatctcacattttcccttccctgaagatctagtgaacattcgacctccattacggagagtttcctatgtttcactgtgcaaatatatctgctattctccatactctgtaacagttgcattgactgtcacataatgctcatacttatctaatgttgagttattaatatgttattattaaatagagaaatatgatttgtgtattataattcaaaggcatttcttttctgcatgttctaaataaaaagcattattatttgctg

SEQ ID NO: 133 - DNA, 90209 bp, Homo sapiens
atggatccttttgtggtccttgtgctctgtctctcatgtttgcttctcctttcaatctggagacagagctctgggagaggaaaactccctcctggccctactcctctcccagtgattggaaatatcctacagatagatattaaggatgtcagcaaatccttaaccaatgtaagtatgctccttcagtggcttgcaaaaggtaagtaaattcacctgtattttttaaataaagtatatccctagaggtacaatgttacaagagatcattgtaaagtaaaatactttgaaaggcttttgttgccttttccagtctgtcagtgtcagaaatagtggaatgaaataatatattttgttattagagaaagatttaggtctttgcatgttaaattcagaataacaaactgtcaatagtttgaaatgttgtgttccttctttatttcatagccatttgctagaatttttggctgagggtaaacagtaagggaagtgtttgttattagagattttattaaataagtcctctactatattagccatgtgttttattcagaatagccgtgaaaattgaacttctctgaagaaataatttatgcctgttgtaaaggaagcagctgtgggtttaggaccagcaaaagcagataagcggtagataagaagttatagacttcaattattagatccacaaactaatgttttaattaagctatagctacaatatataaaccccaaaatgaccttagggtttagtaatagtagaaagagggttagaagatgtataagcattacggttttttcttgagtaaaagatgttttaacagtgttaatatgatatgtgaatacacctcattgtgtagttattagcatatacagagagtaaagggctgcgattagtatattaagccttataagcatgatggtatgatcagatcaagagaatgaggctgtagttatgaagactactcctactagattgatggtagggggcagggcaagattggtggggctagttaagggtcatcactttcagggagagcagtgtttgaaggccccgtgttattagtatgcttttgtgtctggaactggttctttccagtgggttcttggtctcgctgacttcaagaatgaagccacggaccctcgtggtgagtgctacagttcttaaagatattgtgccagagtttgttccttcagatgttcagatgcatctggagtttcttccttctgctgggttcatggtcttgctgacttcaggagtgaagccgcagaccttcgcaatgagtgttacagctcttaaaggtggcatgtctggagttgttcattcctcctggtgggtttctggtctcgctggcttcaggagtgaagttgcagacctttgcggtgagtgttatagctcataaaggtagtgtggacccaaagagtgagcagcagcaagatttattgtgaagagcaaaagaacaaagcttccacagcatggaaggggacccaagagggttgccgctgctggctcaggtgggcagcttttattcccttatttggccccacccatgtcctgctgattggcccattttacagagtgctgatttgtccattttgcagagtgctgattgatctgtttttacagagtgctgattggtgtgtttacaaacctttagctagacacagagagctgattggtgcatttttacagtgttgattggtgcatctgcaaacctttagctagacacagagcactgattggtgtgtttacaatcctttagctagacagaaaagttctccaagtccctacctgacccagaagcccagccggcttcacctctcaatcccccctttaaacaggacaccccaactgctgttgggaattcggtgatgactgctgtagctacttcctgctggagaggggtgaagaaggggtcctgcagttgtagtgtcctccggaggggaactctttaggccagtgaaagggccagtgggtcagtccaggtgtccttggaaggagttgttagttgagctcatttggggttccatttgtaagaccatctgtagcttgatggcgttgatcctagaggaaacaaatttgacaaggaggttaaaaatacagggcctgaaggtgagtaataacaagatggctgccatgggacctagaaaggggagaagccatgttgcctaactccagaggttggtatgagtttgaaaagcattgtctgatttcagaagccatttcctgtaaacactgggtggcatctcatactattcctgattggttagtgtaaaaattatactcttcccctaagaaggtgcagagtcctcctttctcagcagtgaggaggtctagtcctcagtggttttggagagtcactgttgccaaagagtctatttgggattgtagagtaaggatagattttgttatttcttgtaaactgtctgagaaattctttgagagtgtgtggtagtaggataatgaagtagataaactggctattctggttcctgtagcagtagccattcctaaccctataagtagggatattagttgtatggctttgcactgatggagttgagttttgaggggtactgatagggtctgatttcctggggcaatgttaatgttgggacttagaaagactaaggtgcaggtgccagtccagttagtgggaaggcagatataggtcgacattccacataagaagaatataccttggctgggtagacacaactggttgtgtatgttaaaaaggtgtgtgtttgttgttttcattttcccatactcctagagtacttgccaaggtagctctggtgagtggctggaaaggggtgttgggagcaaactgagtggctccgtgtgttctattttcccattggagaaaaaaccgttctgtgtctactaggaaccattcaagagagtgattgaaaggggatgagaaaacatttactagtggtgggggagctgctgcaggggatccaggggtgaatggtcatgcagggagtatgtttgccattacaaagcctggactgtttgttaagcagggaggaggtgatgatattttggggccctgagaagcggacaatccatctggatagagctgtttgagtgactcagaagttactatgatcagttggggcttgaagttgtagggtgtaattacactgatggggtagtaggtgcctcaggggcaggcctgataacaggttgcattgcattcatacaggggcttggaaagttaagatggtatttgtagttacaaggctgtgtatgggcttttcattgcttgtgtaataggtgaggttggaaatgtaagaatgtaaaagttggattgcacgtcctgttagggtattcttggtcctatcagagatggagaagtcagctaatgattgcatatttagaagttggaaagggtcttttccgtcataatgaaggtggtaggttaatttggtaaagatccagttttttgtgggaatgggggtggcaacataagcagaggttgatagatacaaagccaacagtcatttgccagggaaggattggactggtttaacaaagagtgggttaatctgagagtcttgtagagataattaggagctagtggaaggggaggggtgattgaggtatccaaggaagcaggagggatagataggcaaagaataaataggaaggtaaagatggtgctctggaagatgagatcattttatccaggccgagtaaaaggtaggagtaaattgctgtcagaaggaaggaagacagaaaaaaggttgatgtgattaggattttcatcccagcaggagctacagtatatagtcctattgcaaagagtatggttaatatgctgcttaataatatgatgaaatagtaaaagggttccattaaaggggcaagaagaggtgttaaagataaagattatgtaggttttcacttatcttttttaaggaggaaggggtttttcttcaggatcggtggtaggagcctttttagtctgggatgtttccttctgaaataagagatgcaagtcctccaacagttcgcaggtgtattgaggctggtctggctgatcttgggactcctgagctgatggtactgcaggttcctcaggggatgtccaaaatttaactcaggtgtggcgaatccaagattccattcctgaaccttaacagcagtggggttagagaggattaccgagtatggtccttcccacaaagaggccatagatagggaggtagaggggagagatttgatcaacactagatctcctggttgaaacaactctgttcccttttctctgtgatatccttcaggtaggtttttaaggtttcattgatattttgccaaagaagttatatctttgaccaagttggccgtttcctgatcaagtaggaggtcatttgtgaaaaaaggccatccatacagcatttcatttggactgagccccattttgtgagaatttcggattctcaacaaggtcatggacaaaagagtaaagagtaggccatgggaaatgagattcttgtgttagtttccttaagtgcctcttgactgttttatttgccttcttgaccttccctgaggattgtggccttcaggtgctgtgaaggtgatattgtatccctagtgccctggaaattccctaagttattatggctttaaaagccagaccattgtcactctgtaagctttggggaagccaaaatctaggaattatttcatgaattaggactttaatcactttctcagccttctctgtcttgcaggggaaagcttctatccaatttgtaaaggtatcaacacagaccaacaagtattgaaatccctttgacttaggcatatgggtgaaatctaactgccactcctctccaggatagtgacctattctttgttccccccaaaggggccctatgatggaccaagggattattcttttggcacacctcagaggctttgactacctgtcggattgtccagaggagatttggccctgtaaatagggatttggccatttgatgagtgttttcaatacccatatgaaaagtttggaggagggttttaagtattttccactggctggcttcaggtataagtacctgtccttcttctgtcattaaccacgctgaggggagagaaaactatgcccctgtgaaagttcccattctgtttcagtcagggaatactggggcttaatctcttggaggggtttgttccataccaagtgtccttccataggtatttctaatgggaggttccacctggcagcaattttggcctcagcacctccctgatggtttccttctgccttttctccttcacctttctgatgtctttggaagtgtaagactgccaccaccttgggtttttgcactgagtgcaataactccataattcccttgtggtatttaatgggggtttctccagaggttaggaacttcctttctttccatattgcagcatgggtatgtaggattagataagctacttgctatttgtatacacatttattctttttccctttcccagttctaaggctcgggtaagtgccaccagttctgctaactgggcactggtccctgtgggaagaggcttactttcaagtacagttacaccactaactttgccataacctgcccttcatatcccattctccacaaatgaacttccttcggtatataggttaaggtcaggattagctaaggggacttctaagaggtcatctcaggtggcataaatctggactataatttgttggcagtcatgataccttggttccccatcctctgggagaaaagtggcagggttgggggctatgcctgtatgtatttgaagcaccagtccctcaaggagtagcacctgatatctaagtaggcagttgtctgataaccataaacttcctttggcacctagtatgccatttatatcatgagtagtccagacagtgagatcctttccttgtattattttgatagcctctgacactaagacagccatcaccacaactacccataaacagtgaggccagccttttgctacaacatcaatttccttacttaggtataccactggttgtggggttgtttcacgagtctgagtaaggactccaagaggtatccctgctctctctgtgacgtataaagagttttgtcctgtgggaaggcttaaagctgaagcttgtactagggcctgctttaaggttttgaaggctgtttctgcccctggttcccattctactagatgagtatttgccctctgggtttccttgattagagtacagaggggcctggctatctcactgtatccggggatccatagttggcaaaagtcggtgattccaaggaatgcccacaattgttttaatgtcttagggtgaggataagccagtataggctgtattcattccttgctgagggccctggtccctctggctaagattaggcctagatatttgacctgctgtaggcaaagctgggcctttgacctagacgccttgtacccttgattagctacaaagttcaagagatctagagtaccctgctggcatgaggcttccgaactgatagctaaaagtaaatcatccacgtactgaaggaacagagtgcctggacctgagaagtggcctagatcttgggccagtacctgaccaaagagatgagggctatccctaaacccttggggcaagactgtccacataagttgggacgtgtggtctgagggatcctcaaaggcaaagagaaagtgggagtcagagtgcaggggaatacagaagaaggcatccttgaggtccagaacagtgaactattctgcttcctctggtatttgacagagcagggtttaggggttgggtacaactggatatagaggaattactgcctcattgatgagtataagatcttgcactagtctccacagactgtttggtttttgtactcctagaattggggtgtcgcagggactgctgcatttccttactgaggcttgagtttttaaacgtttaacaatatcctgtaatccttcatgagcttcaggccttaagggatattgcctttgataaggaaaagtggtggggtcttttagcctgatttggactgggtgggcattttttgctcttccaaattgtccttccagtgcccagacttcagggttaattccctcctcaagtaggggacaacaaatgggtaacttgtttctcatattcatgtagataatagctccagctttcactaatatatccctccttaataagggtgtgggactttcagacataacaagaaaggcatgtgaaaagagcaaagtctcccaattacaactgaggaggtgggagaaatacctggttacaggctgtcccaggatttctcagatggtaacggaccttgaggaccgtcatccaggacaggagattaacactgagaaggccacaccagtgtccaggaggaagtcaatttcctggccctcaatggttaaacatacccaggactcagtgagggtgatgacatgggctggcacttaccctgggcaccctgagtcctgttgttggatcatctggttgggggcttctggcccagagaaccattgcactctggggaagtgtgccttccagtgattgccttggcatagcagacatgggtgagggggtggcttgtttctcattggacaatcttttttaaaaatgtccttgtaaaccacactgataacaagccctactgggtgattggcctgctattttctgtcctctctgaaccaccaagctttctttgtctgagggccatgactaaggctgtgacctttctctgatctcagttttccttttgggcctgttcctcttggtacctattatagaacactgaggttgccagttttaataatgcctccagattttgttcagggcccagggctcacttttggagctttctcctgatatctgcagctgattgggtaaaaacttatcttttaggatcaattgaccttctagtcagttgggtgacaggggagtatattttcttaaggcctcctgtagccactcgaggaaagcagaaggattttcttcctttccctgagttatggtggacatcattgaataattcatgggctttttcctaattctccttactccttctagaacactggtcaacagatgtttatgactacagtccccatgatctgagtcgaggtcccagtggggatccatactggggatggcttgctgaccagtagggaatttgtccctttcttcagctgtcattctatcatttacttgactaagatactaggtctctccaaactctcaggctgcagctaaagccacattcttttcattaaaggccagggtttgatctaacaatagcatgacatctctccaagtgagatcgaaggtttgccctagaccctgtaggacatctatgtacctatcaggatcatctggaaacttccccaggtctgccttgatctgctgtaaatcagagagggagaagcggccatgtacccaggttgggccaaatttacctccccctacagcttgaagggggcataactgatagcccggggttttttgtggtcctttggagatttctttgcttatttccttctgggaaggggagattagaggaggcttatcattaataggaagtggaactataggtaggctaggatacgggggtaagctgaaaagtcctcctgtgggatgtaaattgcaagctttgcatagttgtgtattcttcttcaatgaaaagaaagcttggatataaggtatttcactccatttggctttcctcttacagaaatggtcaagttgcaggatagcattgtaatttatacttccctcagttggccatttttccccatcagagagagaatagtggggccaggccatagtgcagaaaaaaatgagccacctctttttcagggtttgtgagtcaaattggtcccaatggcttaggatgcatttcaagggtgagcctgttgatgcctgattgtctctcatcggaaagacaaaactctccatggttttggtttgtttgtttctacctgcccaggaacctgcaacagtccctggaccctgctgatcagaatagttgcactcactgatgcagcagcagaaacacctcttgcccaagaacccaaaacagtccctggaccttgctgatcagaatagttgcactcaccgacacagcagcagaaacactagttttcctcctagaccagaaggaggactgaggaaggtcggatttagtggcccttaccaatgcattcttgaaaacgtgtacccctgcctgtcctcgtagaccacaaagaggactgagaaaaatcagatttagttgcccttaccaatgcattctcaaaaacctgttagagtcctaagtgttctcctgttagtattgggactttacctgtgtcctatgaagatgttatgccccaaaaatgaaatggagggccataccctgagggagggaagggatctccagagttggaagtgtgatgccttttgtcctcatttatatgaacaggaaggatagaatttctgaggatccccatatcctagcttcaggaatagtttttgttaggcctgcttgtctgaggagggattctaaaattccagatagtaccccctaaaatggggctttgggcaaaaattatgtctttctgattggtgagcccgggtgcctaaagaaggtaacagagtcctggagtttatactagaaatcattcatgtaggagaaactagaaaagcaccagagacaggcagtggtttttagaagcgggactagccttggagaagagaggcaagaggaagtttgtctggcaggcattaggacccaggaggcaagggtcaggatagctaggatagataggcaagtctctcttgggtgacatgactttgagagttctgctcatggccacagggtcaaccaacttgttgtcgggaccccggagctgaatggctttcctctctgtcaacccttggcgcagcccagaaatacaggaaaagtggaagctggttccaggcaaaccaacgctcccaactccaaagagttggggattgttagagagccctttcccagaaagcctgacacccctgtctttagtctggtggccacattggtcactttttgttttgagacggagtctcgctctgtcgcccaggccggactgcggactgcagtggcgcaaccttggctcgctgcaagctccgcttcctgggttcatgccattctcctgcctcagcctcccgagtagctgggactacaggcgcccgccaccgcgcccggctaattttttgtatttttagtagagacggggtttcaccttgttagccaggatggtctcgatctgctgacctcatgatccacccgcctcggcctcccaaagtgctgggattacaggcgtgagccaccgcacccggccattggtcacttttaactggctgacaggtgcccagtatttagcccctgaattctaaggaaaaataggacagaacagcaagtgaaagggatccagtggtacttactgcttggcaataggcaaaagtcccttcattgtcaccaaaatgtgtccagaattggttccttccggtgggttcttggtctcactgacttcaagaatgaagctgcggacccacatggtgagtgttacagttcttaaagatggtgtgtctggagtttgttccttcagatgttcagatgtggccagagtttcttccttctggtgggttcatggtcttgctgacttcaagggtgaagctgcagaccttcacagtgaatattacagctgttaaagatggcacatccagagttgttcattcctcctggtgggttcatggtcttgctgacttcaggagtgaagccacagaccttctcagtgagtgttactgctcttaaaggtggtgtgtcgagttgttcattcctcctggtgggtttgtggtcttgctggcttcaggagtgaagctgcagacctttgcagtgagtgttacagctcttaaaggtggcatatctggagttgttcgttcctcctggtgggtttgtggtcttgctggctttgggagaaaagctacagacctttgcagtgagtgttacagctcataaaggtagtgaagacccaaagagtgagcagcagcaagatttattgtgaagagtgaaagaacaaaacttccacaatatggaaggggacctgagcaggttgccactgctggcttgggtggccagcttttattcccttatttgccccacccatgtcctgctgattggtccattttacagagtgctgattgttccattttacagagtgctgattggtgtgtttacaaacttttagctagacacagagcattgattggtacatttttacagagtgctgattggtgcatttacaaacctttagctagatacagagcactaattggtgtgtttacaaacctttagctagagagaaaagttctccaagtccccacccgacacagaagcccagatggcttcacctctcagtttagttgtgtacttgtttgtagttggaatttgcaaggcagaataatagggatgaggttagtccatgggtaattattagggcagttgcaccggtaaaacttcagggggttttaatgagaatagccatgataataagtgacatgtggcttatggaggaataagtaatgagtgattttagatcagtttggcacagaaaaattgagcttgttatgattattcctcatagggatagtatgagggaggaataagctataaactctgttaaggggttaaggattagggtgattcttataatcccatagccacctaattttaggagtactgctgtggagactattggcccagcaatcgggacctctacatgggcttttgggagttctaggtggattccatagagaggtgcttttactataaatgctatgatgcatgctaatcataaaagactgttggaccaggaaattgttagttcttgaagctgggtatttgtcttaaggtagacacaagagtgctgataaatttctcaagcatgagtgtttgaataagtgaagtttcaaatttgggtcttctgtatattagctgtgggacactgaaaatgaatttgtcattctcttagctcagtttgtttgtttaaaatagagcaaatagacctgctgaatatgttggtgtgagggttaattgtaatctgtgtagcaattgtctgaccattgccttgaacatcataggccatctgagtggcaagtataataatcatcatcatgtttatatataaaattcagaaatatttgagcctgtgtgactgaataaaagcatacaaatacaatgaaaatatgaatctaagtcaggcttagtaaatggacaaaacagtgacttcatttgctgttaactgtatctccttttctagctctcaaaaatctatggccctgtgttcactctgtattttggcctggaacgcatggtggtgctgcatggatatgaagtggtgaaggaagccctgattgatcttggagaggagttttctggaagaggccatttcccactggctgaaagagctaacagaggatttggtaggtgtgcaagtgcctgtttcagcatctgtcttggggatggggaggatggaaaacagactagcagagcttctcgggcagagcttggcccatccacatggctgcccagtgtcagcttcctctttcttgcctgggatctccctcctagtttcgtttctcttcctgttaggaatcgttttcagcaatggaaagagatggaaggagatccggcgtttctccctcatgacgctgcggaattttgggatggggaagaggagcattgaggaccgtgttcaagaggaagcccgctgccttgtggaggagttgagaaaaaccaagggtgggtgaacatactctctatcactgacctttctggactgctctcctctctactgacattcttggaaacatttcaggggtggccagatcttttatttggagtcctggttgttagctcatgtgaagcagggtttgaagctgagagccaagggaatttgcacatgtttgtgctgtgtgtgtacaggcatgattgtgcatacagtgtgggtataaaagttcatttaatcctatgttctcctgaactttgcttctttgttttcaaataagaaatgatgaatatagattttgagttcattttttgaaagagttaaagagcagtgtttttcccattatctattccagaacatgtcaccagagaatacttgacaagtggacatggtggaaatggccctatcacacccctagggagcatgaaccaaatggcatgtgcttttatttaattggactatgtttgtatggtcagcctcactgacttgtctagggtttcttttaggcccatgcttgccattctggccagtaatgacattctacagtttttattgcttaggcatatcttagtgtagttctcatcagcttttatttctctgtaaatacagcattatttaaaaaatagtgttaattatttcttgttactctattgattttgagtaaacatatgctatgacataattctgtgaaatacacaaatgtctatttataaaataatttatttaactagattttaattattagtaataactgtaatttttattccttaagtataatttggctctgtttcattttgcttatctctttccaatcatatttatgaaattttggcttagaaatttatggtaattattattttccactgccaactctactcacctatgaagttttacaatgaatcagtttatcagcttggataccaaattacctcatttttaaattctgttttccaaatgaagtgaaagactgaaaatcagatttatctgtgaatgatacacacacactcaacagacttccagctgttcaatgccttgctattcattcagagtacttttgactaaagtcactatttagggcctataggtgtgaatttggaagctctttaaatataaagtttaatatttcaaaataataagagctatttatgaaaaacccatagccaatatcatatttaatgggcaaaatctggaagtattccctttgaaaaccagagcaagacaaagatgccctctctcaccactcctattcaacatagctttggaagttctcaccagggcaatcaggcaagagaaagaaataaatggtattgaaataggatgagaggaagtcaaattgtctctgtttacagatgacatgattgtatatttagaaaaccccattgtctcatccccaaaactgttcatgctaataagcaaattcagcaacgtctcaggatacaaattcaatgtgcaaaaatcacaagcattcctatacaccaataatagacaagcagacagtcaaataatgagtgaactcccattcacaattgctacaaagagaataaaatggctagaaatacaacttaaaagggatgtgaaagacctcttcaaggagagctacaaaccactgctcagggaattaagagattacaaaaacaaatggaaaaacgttccatgctcatgaatagtaagaatcaatattgtgaaaatggccatattgccaaaagtaatttataggttcaatgctattcccatcaagctgccattgagtttcttcacagaactagaaaaaactactttaaatttcatatggaaccaaaaaagagcttgtaaagccaagacaatcctaagcaaaaagaacaaagctggaggcatcatgctacctgacttcaaactatactacaaggctacagtagccaaaacagcatggtactgataccaaaacagatatatagaacaatggaacagaacagagacctcagaaataatgccacacatctacaaccatctgatcttcaacaaacctgacaaaaacaagcaatgggaaaaagattccctatttaataaatggtgttggacaaactgtctagccatatgcagaaaacagaaactggatcccttcctttcatcttataaaaaaattaactcaagatggattgaagacttaaacataaaacctaaaactataaaaaccctagagaaaaacccaggtaataccattcaggacataagcatgggcaaagacttcatgactaaaacaccaaaagcaatggcaacaaaagccaaaattgacaaatggtaaactaaagagcttctgcatagcaaaggaaactatcataagagtgaacaggcaacctacagaatggaagaaaatttttgcaatctgtccatttgactaaggtctaatatccagaatccacaaggaacttaaacaaatttacaagaaaaaaagaaaacaacaacaacaaaaaaaaactgctgggtctgtcctgcagaccctggccaatggatgaaatgagtactcatatacaggtatgaggtgtaagagcagctaggggactgtctggctcaagtggccagagtgtagcctcgagaagctggagctgcatgtttttattcagtgcaggcacaatgctgaaaacctggagcccatgcaatctgtaggtaattaatatttattgttcccctttcagggaacatcaagaatggatgatcaaaggtcagttcctggtcaacataagtaaacaagcctgttcaagatgacttccccttccctcccttgtacatactcctcgtcctctccctcacggtcagagaacagctgcgttcagctattctcacctgaaactatgcagagccttccgacctttcagaaggcctgctcctttccctatactttctcccaccactctgatggatctcctacaaacaaccccatcaaaaagtaggtgaaggatatcaacagacacttctcaaaagaagacatttatgtggccaacaaacatatgaaaaaaagctcatcactggtcattagagaatgcaaatcaaaaccacaatgaggtaaaatctcatgccagttagaatggtgatcattaataagttaggaaacaagagatgctggtgagaatgtggagaaataggaaagcttttacactgttggtggaagtgtaaattatttcaaccactgtggaagacagtgtggcgattcctcaatgctagaaccagaaattccatttgatctagcaatcccattactgggtatatacccaaagggctataaaccattctactataaagatacatacaaacgtatgtttattgcagcactatttacaatagcaaagacttggaaccaacccaaatgcccatcaatgacacactggataaagaaaatgtggcacatatacactgtggactactatgcagccattaaaaagaatgagttcatgtcctttgcagggacatggatgaagctggaaaccaccatcctcagcaaactaacagaggaacagaaaaccaaacactgcatgttctcacttataagtgggagttgaaaaatgagaacacatggacacaggaagggtaacatcacacaccagggcctgttgaggggttggggggcaaggggagggaaagcattaggacaaatacctaatgcatgtggagcttaaaacctagatgacaggttcatagatgcagcaaaccaccatggcacatgtatacctatgtaacaaatctgcacaattctgcacacgtgtcccagaacttaaagtaaaattaaaaattaaaaaatataaagtttaacaatcacttgattacaacaactttatttcagagatcctccaccaaacaagaaaaccttttgtataatttaatttatttagctattaaatgatagacttggtctaatcaatgtcaaatttcaaataagttaaatttgaaggatgattagagatgatgggcatttaattcctagagaagaaaattcatttttaaaaaactaaagaagaaactaaaaactccatttattaatttactttttttcctttttcttttcttttctttttttttttttgagttggagtctcactcttttgccaggctgaagtgcacttgtgtgatatcagctcactgcaacctctgcctcctggattcaagtgattctcctgcctcagcctcccaagtagctgggattacaggcacccaccaccacactcgactaatttttgcatccttagcagagatggggttcaccatgttggccaggctggtcttgaactcctgacctcaggtgatccacctgccttggcctcccaaagtgctgggattacaggcatgagccagtgtgccctatctaatttacttttccttgtttgccttatctgggatttacatttcaaataacaagtttttgtttaatttttttgacaaactaatctatgttagacattctattcatttatgtttgtatttgttctcataaaacacattctgcttcttacatttattttctcaaatacatgaattcacccctagtctctctagttcctctctactggttcaatacatgattctttgagctatttgttgtaatataaaaagctttgaaatccccaactattctcaccctttctatctcagtgctttgttgtctacagactttgcagactgatgtgattccctctgaaacttgaattatttggtttctaaaaaagtctctttttttctttccaaagtaaaagacaaataggccgggaatgtaaatttagcatttgagcaaccattatttaaccagctaggctgtaattgttaattcgagattaatgtaaaagtgatgtgttgattttatgcatgccaaactcttttttgcttttaagggaattcataggtaagatattacttaaaatttctaaactattattatctgttaacaaatatgaagtgttttatatctaatgtttactcatattttaaaattgtttccaatcatttagcttcaccctgtgatcccactttcatcctgggctgtgctccctgcaatgtgatctgctccattattttccagaaacgtttcgattataaagatcagcaatttcttaacttgatggaaaaattgaatgaaaacatcaggattgtaagcaccccctggatccaggtaaggccaagttttttgcttcctgagaaaccacttacagtctttttttctgggaaatccaaaattctatattgaccaagccctgaagtacatttttgaatactacagtcttgcctagacagccatggggtgaatatctggaaaagatggcaaagttctttattttatgcacaggaaatgaatatcccaatatagatcaggcttctaagcccattagctccctgatcagtgttttttccactaaactccaaagccctgtttctataaagtactttggtgacagccccaaagcgtgcttatatcactccatggacatccaggcactttggagtcttccattactcacaaggcttgtccttcaattcacactttgtcatattgtgtgacagaaatatcctaatctaaaagacattatctccttcaaggacagagaatatttggaaccacagaagctgccaagaaacactgaatagggcagaggtgtttgatgtctcagttgggattctagctgatgagacagctggttaggaatgaaaaaattattgtttttttggtgtatgaaccataaacagacatcacacttttaccctgtgctgaattggcatgttttatactctgcctaaataataattgtatgattttacagaagtcatttaactgctctggtgcacagttggaatttgaagtatctttgagcccctcccacttctaaaatactaattcaatttcagaggctgcttgatagaaatcaatatagcagggactatctttgtagtatcaatcaggttgtgcaaactcttttaacctatgctatcatctccaaaatgttaatgtagtaattcataccatcttatatttcaagattgtagagaagaattgttgtaaaaagtaagagaattaatataaagatgcttttatactatcaaaagcaggtataagtctaggaaatgattatcatctttgattctcttgtcagaattttctttctcaaatcttgtataatcagagaattactacacatgtacaataaaaatttccccatcaagatatacaatatattttatttatatttatagttttaaattacaaccagagcttggcatattgtatctatacctttattaaatgcttttaatttaataaattattgttttctcttagatatgcaataattttcccactatcattgattatttcccgggaacccataacaaattacttaaaaaccttgcttttatggaaagtgatattttggagaaagtaaaagaacaccaagaatcgatggacatcaacaaccctcgggactttattgattgcttcctgatcaaaatggagaaggtaaaatgttaacaaaagcttagttatgtgactgcttgcgtatttgtgattcattgactagttttgtgtttactacggatgtttaacaggtcaaggagtaatgcttgagaagcatatttaagtttttattgtatgcatgaatatccagtaagcatcatagaaaatgtaaaattaaattgttaaataattagaatacatagaagaaattgtttagataaatataatctatctgaacaataaggatgtcaggataggaaaagctctgttctgcagcttccagtgagatcagcacaggaggaacttaaatttaaaagaaaataaaaaacatctccatcaaaaagtgagtgaaggatatgaacagacacttttcaaaagaagtcattggagaaatgcaaataaaaacaacaatgagataccatctcatgccagttagaatggcgatcattaaaaagtcaggatataacagatgctgaagaggatgtggaaaaatagaaatgtttttactctgtttgtgggagcgtaaattagttcaatcattgtggaaggcagtgtggcaattcctcaaggatctagaactagaaataccatttgacccagcaatccaattactggatatatatccaaaggattataaattattctattataaagacacatgtacacatttgtttattgtgccactattcacaatagccaagacttggaatcaacccaaatgtacatcaatgacagactggattaagaaaatgtggcacatatacaccataaaatactatggaggcataaaaaagatgaattcatgtcctctgcagggacatagatgaagctggaagcccccactctcagtaaactaacacaggaacagaaaaccaaacaccgtatgttctcactcataagtggcagttgaacaatgagaacacatagacacaggatgaggaacatcacacactggggcctgtcaaggggtggagggcttggggagggataacattaagagaaatacctaatgtagatgacaagttcataggtgcaggagaccaccatggcacgtgtgtacctatttaacaatcctgcacgttctgcacatgtatcccagaacttaaagtataataataataacaataacaaaaatctacccaaggggaaacaaaatgcaggttttaggtgaaatggaagcaattatgaacaagttagaaaatataaaatattatgtcataggatgaaaatgggcatcattattgcacacagtttattggagaatgggaaagaatggtttaacctaggtgggtttcctgcattcctgcagattgaaataggccttaaaatatttgcagtgagagtcagaagaggggtttcagatgggttggaatgctttacatggaggtgtagaggtgtgtgatggaaaagagtaggtggatggaagagggaaggcttcattgagtgtaaactaaaatgatttgtacagataagaattggaatttggtatctatcagataccgtgtaaacatcacctcttttgtcattgcaccatttttgaagaggctattttttcctcctattgaattgtcttgacaaccttgtcaaaacccaattgactataaatgtgtgaagggttttttttggggggctctcaattctactccattgatctatgtgtctgtcctaatgcctatagtacaccatcttgaagtcttaattactgtacctttgtattaatatcaacttattaaatcaaggagtgtgagtcttttgttgttctttttcaatactgttttcactattctgggtcccttgaatcttcatatgaaatttaggatcaacttgtcaatttcttcaaaggagccaatgggaattttgacaggattgcattaaatctgtagaacagggagttatgccattttaaaaattgaagtaaaattcacacaacatacaattaaccagtttaaagcatacacctaagtggtatttaatgtattcacaatgttgtgcaaccatcagctttctctggtttcaaaatgtttttatcacgccacaaaaacgtattatattcgctaaataatcactccattcccccactccatcatgtaataacctctaatcttttttctgtctctatgggtttgcgtgttatggatatataaagaattcatagcatatgcaaccttttatttctgggtccttacacttacaatgttttggaggctcatctaagttgtagcatatatctgtacttcattctttttgtggataaagtatattttattttctatgcacatttatcacaaattgttattcatctgtttgtggacatttgcattgtttccaacttttggctcttatagataatctttctttaaccatttgtgtatgtttctttatgggcatgttttcatcattcttgggtgtattctcaggagttgatttgctgggtcaaatggtaattttatgtttatcttcttgtataagagccaaatttttctacagtgaatgtggcattttatattccttccagcaatgtagaaggatttctgtttctccacatagttgctaatacttgtaattttctgtgtttattaaagccctcctagtgaatgtaaagtggtatctcattatttatttatttatttatttattttgagacagagtctcactctgttgcctaggctcgagtgcagtagcatgatctcattcaagcaattctcctgccccagccttcagagtagctgggattacaggaatgtgccaccatacctgactaatttttatatttttggtagagatagggtttcaccatgttggccaggctggtctcgaactcttgacctcaggtgatctgcccaccttggcatccctaagtgctgggattacaggtgtgagccaccatgcccagctctcattgtggttttaacttgtatttaatgaccagtgattttgaacttcttttaatatactgttacccatttgtatatcttctttggagaaatgttattcaagtccatttcctatttaaattaagttgcctttatttttctttttaagctattagaattgtttatgttttcaaaacattaaactcttacatatacataatatgaaaatatttcctcccattctgttggttgtcatttcacattcctaattatatttttgatgcacaaagtttaattttgatgaagtttggtttatctattttttcttttgctcctctggtatcaaatttatgaacctattgccaaatatgaagtcatgaagatttacccctacattttattctaagagttttatagttttagcccttatatttaagtttttccgtccatttttcagttatatttttcatttggagtgaggtagggtaggtcccagctacattcttttgtattttgtcatccaattgactcatcaccatttgttgaagagattctttcctcggactgaatggtctaggcacccttgatgaaagtaaattggccacagatgtttaggtttatttcttgatttcagttttattccattggtcttgatgtctatctttatgctagtaccacacttttgattattatactttgtagtaagttttgaagtcagaaactgagaactcactgatacagaaattaagaagaaattacttaggcagagagtaagcatttgggaattctcagtaaggtttttctttttaatgaaaagcaaccctaaatcattgtctggcaaagagcatcgcgtaaaatcgagctgcagtcatagacaagcaagctggaagcctgcccggtgaatgctgataggaaagaactacctgtgactaggcatgttcaaaatggcagctctatcttcccttccctttgccagccacatgtacagtaaggagcagacaagatggcgctggtcaagtggaaagtccatttgcataataacattagagtgggttggccagccttccctgcccactatgtaaatgccacacctgattgagccaatctttgggccctatataaatcagacactgccttttccggcctgcctataaaatctgctgtggtccgcctccttccccctctttggatgtctctctctctctctctcacaagaagctgctctttttctcctttcttctgttattaaactacctgctccttaacccactcagatgtgtccatgtcctaaattttcctggggtacgatgacaaacctgagggtatatatcccaggtaatgtagctgcttcatcaccatgtagttgcatatgaattggacaatcaactttcccatttctggaaaaaggtcacgggtattttggtagggattgcatagaatttttagatcactttgaggagtattgccatcttaacaatattaagtcttccaatcctggaacattgaagagttttcaatttatttaggtattagatattcttttttcctcttttgcaagggtctggtttagtttgaaaggcaagtttaccttaaattttgtatttagttatgatcattgcttgcctgattttaaaatgataccatatgaaatactttctttttaaaaaaattttcaacttttattttagattcaggaagtgcatgttcaagtttgttacatgggtttattgtgtgatgctgaagtttagggtacaaataatttcatcacccaggtagtgagaatagtacccaataggtagtttttcagctcttgcctttatatctctctaccatctatagtaattcccagtgtgtattgtttccatctttgtgtcccacttttatatgagaacacgtggcatttgattttctgttgctgcattaattctctcaagacaatggcctccagctgcatctatgttgctgcaaagacatgattttttttatggctgcatagcatttcatagtgtatatataccacattttctttatgccacacaccattggttgcttctgtgtctttgctattgtgaatagtgcagagatggacatatgagcacatgtgtctttttggtataacaatttgttttccactggatatgtacccagtagtggaattgctgcatcaaatgataattttgtttttagttctttgagaaatttccaaactgctttccatagtggctgaactaacttacatttccaccagtagtgtataagttttcccttttttctgcagccttaccaacatctgttattttttggctttttaatcatatccattctgactggtatgagatgatatctcattgtggttttgatttgcatttctctgatgataagtgatgttcagcattttgtcatatgcttgttggccatgtgtatgtcttctttggaaggacatatgttctttgcccactttttaatgaagttatttgttttttaacttgttgaattgtctaagtaccttatagattctcgctattggaccattgttagaatcacagtttgcaaatattttgtccccattctgtaggttgtctgtttattgtgttgatactctgtcttgctgtgcagaagctctttactttaattaggtcccacttgtcaatattcattttggttccaattgcttttgagggattattcataaattctttgcaaaagcctgtatccagaatggtattacatatatttttttctataggattgttagtttgatgttttaaacttagatcattaatccatttcgagttaatttttgtatatggtgcaaggaagtgttccagttttattctgcgtatggctagccagttatcctagttcaatttactgaatagagagtcctttcctgattgattatttttgtcaactttgttgaagatcagatggctataggtgtgtggctttatttctggcttctgtattgctttggctacttgggctcttctttggtttcaaacgaattttagaatagtttttccttattctgtgaaaaatgacattggtagtttgataggaatagcattgaatctgtagatagctttgggcagtctagccattttaatgatattgattgttttaatccataagcatgaactgttttttcatttgttagtgtaatctatgattttgttcaacagtgttttgtagctctccttgtagagaccgtttgcccctttgttagctgtattcctaggttccattccacccccaccccccactatggctattttaaatgggatggcattcttgatttggctttcagcatgaacatttttgatgtatacaaatggtactgagttttgtacatttattttgtgtgctgaaatttcactggagttgtatatcacttccaggagctttttggaaggttctttagggttttctaggcctgagatgggtcttctaggtctgagatggagcttctatatctactagtaaaagattagccttgtactcttgaagacagtagaaggatgggtattttttaaaatttttaaattataccttaagttctggggtacatctgcagaacgtgcagttttgctacataggtatatacgcaccatggtggtttgctgcacccatcatcctgtcacctacatgaggtatttctcctaatgctatccctccctgtgtccatgtgttctcattgttcatttcccacttatgagtgagaacacacagtgtttagttttctgttcttgtgttagtttgctgagaatgatggtttccagctacatccatgtccctgcaaagtatgtgaactcatcctttttaatggctacatagtattccatgatgtacatgtgccatattttctctatctgtctatcattgattggcatttgtgttggttccaagtctttgctgttgtgagcagtgctgcaataaatatacatgtgcatgtgtctttatagtagaagggcttataatcctttgggtatatacccagtaatgggattgctgggtcaaatgttatttctagttctagatccttgaggaattgccacactgccttccacaatgattgaactaatttacattcccacaaacagtgtaaaaatattctatttctccatatcctttccaacatctgttgtttcctgacttttaatgttcgccattctaactggcatgtgatggtatctcattgtggttttgatttgcattcttctaatgaccagtgatgacgagctttttttcatatgttttttggccacatagatgtcttcttttgagaagggtctgttgatatccttcacccactttttgatggggttgtttttttttcttttaaatttgtttaagttctttgttgattctggatagttgccctttgtcagatggatagattgcaaaaattttctcccattctctaggtggcctgttcactctgacgatagtttcttttgctctggagaagctctttagtttaatgagatctcattagtcaattttggtttttgttgccattacttttggtattttagtcataaagtccttgcccatgcctatgtcctgaatggtattgcgtaggttttcttctagggtttttatggttttagggcttatgtttaagtctttaatccatcttgaattaatttttgtataacttgtaagaaagggatccagtttcagctttctccatatggttagccagttttcccaacaccatttattaaaaagggaatccttcccctatttctttttttgtcaggtttgtcaaagatcaaatggctgtagatgtgtggtgttatttctgaggcctctgttctgttccattgatctatatatccattttggtaacagtaccatgctgtttttattacttcggccttgtaatatagtttgaagtcaggtagcatgatgcctccagctttgttctttttgctgaggattgtcttggctatactggctcttccttggttccctatgaaaatgaaagtagttattttgaattctgtgaagaaactcaatggtagcttgatggggatggcattgaatctataacttaccttgggcagtatggccagtttcatgatattgtttcttcctatccatgagcatggaatgttcttgcatttgtttgtgtcctcttttatttcgttgagcagtggtttgtagttctccttgaagaggtccttcacatcctttgtaatttggattcctaggtattttattctctttgtagcaattgtgaatgggagttcactcatgatttggctctctgtttatctattattggtgtataggaatgcttatgatttttgcaccttgatttttgtatcctgagactttgctgaagttacttaacaatttaaggggttttgggctgagacaatggggatttcctaaatataaaatcatgtcatctacaaacaggaacaatttgacttcctcttttcctaattgaataccctttatttctttctcttgcctgattgccctgggcagaacttccaatattatattgaataggagtggtgagagagggcatccttgtcttgtgccagtttccaaaggaatttcttccagtttttgcccattcagtatgatattggctgtgggtttgtcataaatagctcttattattttgaaatatgttctatcaatacctaatttattgagagttttagcatgaagagctgttgaattttgtcgaaggccttttctacatctattgagataatcatgtggtttttgtctttggttctgtttatatgatggattacgtttattgatttgcatatgttgaaaaagccttgcatccccgggatgaagccaacttgatcgtggtggatgaagccaacttgatcgtggtggataagcttgttgatgtgctgctggattcagtttgccagtattttattgaggatttttgcatcgatgttcatcagggatattggtctaaaattctctttttttgtgtgtctctgccaggctttggtatcagtatgatactggcctcacaaaatgattagagagaattccctctttttctattgattggaatagtttcagaaggaatggcaccagttcctctttgtacctctggtggaattcagctgtgaatccctctggttctggactttttttggttggtatgctattaattattgcctcaatttcagagcctgttattggtctattcagagattcaacttcttcctggtttagtcttgggagggtgtatgtgtccgggaatttatccatttcttttagattttctagtttatttgcgtagaggtgtttatagtaatctctgatggtagtttgtatttctgtgggatcagtggtgatatcccctttatcattttttattgtgtctatttgattcttctctattttctcctttattatttttgctagcagtctatcaattttgttgatcttttcaaaaaaccagctcctggattcattaactttttgaagggttttctgtgtctatctcctccagttctgctctgatcttagttatttcttgtcttctgctagcttttgaatatatttgctcttgcttctctagttcttttaattgtgatgttagggtgtcaaatttagacctttcctgctttctcctgtgggtatttagtgctataaatttccatctacacactgctttaaatgtgtcccagaaattctggtgtgttgtgtctttgttctcattgatttcaaagaacatctttatttctgacttcatttcattatttacccagtagtcattcaggagcaggttgttcagtttccatgtagttgagcagttttgagtgagtttcttaatcctgagttctagtttgattgcaccgtggtctgagagacagtttgttataatttctattcttttacatttgctgaggagtgctttacttccagctatgtggtcaattttggaataagtgcaatgtggtgctgagaagaatgtatattctgttgatttggggtggagagttctgtagatgtctattaggtccacttggtgcagagctgagttcaattcctggatatccttattaactttctgtctcgatctgtcaaatgttgacagtggggtgttaaagcctcccattattattgtgtgggagtctaagtctctttgtaggtctctaaggacctgttttatgaatctgggtgctcctgtattgggtgcatatatatttaggatagttagctcttcttgttgaattgatccctttaccattatatattggcctagtttgtctcttttgatctttgttggttaaagtctgttttatcagagactaggattgcaacccctgcatttttttgctttccatttacttggtagatcttcctccatccctttattttgagcctatgtgtgtctgcacgtgagataagtcacctcaattcagcacactgatgggtcttgactctatcctattttccagtctgtgccttttaattggagcatttggcccatttacatttaaggttaatattctgtgaatttgatcctgtcattatgatgttagctggttattttgcttgttagttggctcagtttcttcctagcaatgatggtctttacaatttgacacttttttacagtggctcataccagttgttcctttccatgtttagcacctcctgcaggagctcttgtaaggcaggcctggtggtgacaaaattcttcagcattagctcgtctgtaaaggattttatttctccttcgtttatgaagcttaatttggctggatatgaaattctgggttgaaaactcttttctttaagaatgttgaatattggctcccattctcttctggcttgtagagtttctgctgagagatccgctgttagtctgatgggcttccctttgggggtaacccaacctttctctctggctgccctaaatatttattccttcatttcaactttggtgaatctgacaattatgtgtcatggggttgctcttctcgaggagtatctttgtggcattttctgtatttcctgaatgtgaatgttggcctctcttgctaggttggggaagttctcctggataatattctgaagagtgttttccaacttggttccattctccccatcactttcaggtacaccaatcagatgtagatttggtcttttcacatagtcaaatatttcttagaggctttgttcatttctttttactcttttttctctaaacttcccttctagcttcatttcattcatttgatcttcagtctctgataccctttcttccactagattgaatcggctactgaagcttgtgcatgcatcacatagttctcatgacatggttttcagttccatcaggtcatttaaggtcttccctatgctgtttattctagttagccattcgtctaatcttttttcaaggttttaacttctttgtgatgggttcaaacatcttcctttagcttggagaagtttgttattaccgatcatctgaagccttcttctctcaactcgtgaaagtcattctctgtccagctatcttctgttgctggcaaggagctgcttcctttggaggagaagaggtgctctgatttttagaattttcagattttctgctctcgttactcccatctttgtggttttatctaccttttgtctttgataatggtgacatacagatggtgttttggtctgggtttcctttctgtttgttagttttccttctaatagtcaggactctcaggtgcaggcctgttggagtttgctggaggtccactccagaccctgtttgcctggatatcaccagtggaggctgcagaacagcaaatattgcagaacagcaaatgttgctgcctgatccttcctctggaagctttgtctcaaaggagcaccgggctgtatggggtgtcagtcggcccctactaggaggtgtctcccagttaggctactcgggagccaggtacccacttgaggaggcagtctgtccattctcagatttcaaacttcctgttgggagaaacaccactttcttcaaagctgtcagatagggacgtttaagtctgcagaagtttctgctgccttttgttcagctatgccctgcccccaaaggtgtagtctacagaggcaggcaggcctccttgaggtgcggtggtctccacccagttcgagcttcctggctgctttgttaacctactcaagcctcagaagtggtggacgcccatcccccagccttgctgccaccttgcattttgatctcagactgctgtgctagcattgagcgaggttctgtgggcatgggaccctctgagccacgcatgggatataatctcctggtgtgccatttgctaaggccattggaaaagcacagtattagggtgggagtgtcccaattttccaggaaccatctgtcatggctttccttggcttggaaagggaattcccccaccccttgtgcctcccaggtgaggcgatgccctgccctgcttcagctcacactccatgggctgtacccattgtctgacaagccccagtgagatgaacccagtgcctcagttggaaatgcagaaatcacccatcttctacattgctcacactgggagctgtagactggagctcttcctattcggccaccttggaacctcccagtatggccattttctcaatatttattattcctatccaagagcatggaatattttttccatttctttgtgtcctcttttattttgttgagcagtggttggtagttctccttgaagaggtccttcacatctcttgtatgttggattcctaggtattttattctatttataacaattttgtatgggagttcactcatgatttggctctctgtttgtctcttttttgtgtatatgaatgcttgtgatttttgcacattgattttgtatcctgagactttgctgaagttgcttatcagcttaaggagattttgggctgagacgatggtttttctaaatacacaatcatgtcatctgcaaacagggacaatttaacttcctcttttcctaattgaataccctttatttctttctcctgcctgcctgattgccctggccagagcttccaacactatgttgaataggagtgatgagagagggcatccttgtcttgtgccagttttctttatatatgtaaatatatatatatttttatactttaagttgtagggtacatgtgcacaatgtgcaggtttgttacatatgtatacatgtgccatgttggtgtgctgcacccattaactcatcatttacattaggtatatctcctaatgttatccctccccccacccccaccccacgacaggccccagtgtgtgatattctccttcctgtgtccaagtgttctcattgttcaattcccacctatgagtgagaacatacggtgtttggttttttctccttgccatagtttgctgagaatgatggtttccagcttcatccatgtccctacaaaggacatgaactcatccttttttaaggctgcatagtattccatggtgtatatgtgccacattttcttaatccagtctatcattgatggacatttgggttggttccaagtctttgctattgtgaatagtgccgcaataaatgtacatgtgcatgtgtctttatagcagcatggtttataatcttttgggtatttacccagtaatgggatggctgggtcaaatggtatttccagttctatatccctgaggaattgccacagtgacttccacaatggttaaactagtttacagtcccaccaacagtgtaaaagtgttcctatttctccatatcctctccagcacctgtcgtttcctgactttttaatgatcactgttctaactggtgtgagatggtatctcattgtggttttgatttgcagttctctgatggccaatgatgatgaacattttttcatgtgtcttttggctgcataaatgtcttcttttgagaagtgtctgttcatatccttcacccacactttgatggggttttttttcttgtaaatttgtttgatttctttgtagattcttgatattaggcctttgtcagatgagtagattgcaaaaattttctcccattctgtaggttgcctattcactctgatggtagtttcttttgctgtgcagaatctctttagtttagttagatcccatttgtcaattttggcttttgttgccattgctttttgtgttttagatgtgaagtccttgcccatgccaatgtcctgaatggtattgcctaggttttcttctagggtttttatggttttaggtctaacatgtaagtctttaatccatcttgaattaatttttgtataaggtgtaaggaagggatccagtttcagctttctccatatggctagccagttttcccagcactatttgttaaacagggaatcctttcccatttcttgtttttgtcaggcttgtcaaagatcagatagttgtagatgtgtggtattatttctgagggctctgttctgttccattggtctatatccatatggtacaagtaccatgctgttttgtttactgtagccttgcagtatagttggaagtgaggtagcatgatgcctccagctttgttcttttggcttaggattgacttggcaatgtgggctcttttttatttccacaagatctttaaagtagctttttccaattctgtgaagaaagtcattggtatcttgatggggatggcattgaatctataaattaccttgggcagtatggccattttcacgatattgattcttcctatccatgagcatggaatgttcttccattagtttgtgtcctgttttatttcattgagcagtggtttgtagttctccttgaagaggtccttaacatcactcctaagttggattcttaggtattttactctctttgaagcagttgtgaatgggagttcactcatgttttggctctctgtctgttattggtgtataagaatgcttgtgaattttgtacattgattttgtatcctgagactttactgaagttgcttatcagcttaaggagattttgggctgtgacaatgtggttttctagttacacaatcatgtcatctgcaaacagggacaatttgacttcctcttttcctaattgattacccttaatttctttctcctacctgattgccccggcgagaacttccaacactgcgttgaataggagtggtgagagagggcatccctgacttgtgccagttttcaaagggaatgcttccagtttttgcccattcagtatgatattggctgtgcatttgtcataaatagctcttattatttttagatacgtcccatcaatacctaatttattgagagtttttagcatgacgggttattgaattttgttgaaggccttttctgtatctattgagataatcatgtggtttttgtctttggttctgtttatatgctggattacgtttattgatttgcatatgttgaaccagccttgcatcccagggatgaagccaacttgattgtggtggataagctttttgatgtgctgctggattcggtttgccagtatttttttgaagatttttgcatcgatgttcttcaggcatattggcctgaaattttttgtgtgtgtgtctctcctgggctttggtatcaggatgatgctggcctcataaaattagttagggaggattccatctttttctcttggttggtataatttcagaaggagtgtaccatctcctcttggtacctctggtagaatttagctgtgaatccttctggtcctgaactttttttttggttggtaggctattaattattgccttaatttcatagcctgttattaatctattcagagtttcaaattcttcctggtttagtcttgggagggtgtatttgttcaggaatttatgcatttcttctagatattctagtttatttgcatacaggtgtttatagtattctgtgattgtagtttgtatttctctgtgattggtggtgatatcccctttatcattttttattacatctatttgattcttctctcttttcttctttattagtcttcctagtggtctatcagttttgttgatcttttcaaaatatcagctcctggattcattgatttttttaaagggttttttgtgtctctatctctttcagtactgctctgatcttagttatttcttgccttctgctagctttggaatttgtttgctcttgcttctctagttcttttaattgtgagttttggtgtcaattttagatcttttctgctttctcttgtgcatatttagtgctataaatttccgtctacacactgctttaaatgtgtcccagagattctagtatattgcatgtttgttctcattggtttcaaagaacatctttatttcttccttcatttcgttatgtccccagtagtcattcaggagcaggttgttcagtttccaaggggttgtgtggttttgagttagtttcttaatcctgagttataatttgattgcactgtggtctgagagacagtttgttataatttctattcttttacatttgctgaggagtgctttacttccaattatgtgatcaattttagaataagcacgatgtggtgctgagaagaatgtatattctgttgatttggggtggcgagttctgtagatgtctatcaggtccacttggtccagagctgagttcaagatctggatatctttgttaaccttttgtctcattgatctgtttaacattgacagtaggatgttaaagtctgccattattattgtgtgggagcctaagtctttgtaggtctctaaggacctgctttatgaatctgggtgctcctgtattgggtgcatatatatttaggatagttagctcttcttgttgaattgatccctttaccattatgtaatggcctttgtctgttttgttctttgttggtttaaagtctgttttatcaaagggtaggattgcaacccctgattttttttttttttttttttttttgctgtctatttgcttggtagatcttcctccatccctttattttgagcctatttgtgtctctgcatgtgagatgcatctcctgaatacagcacactgatgggtcttgactttttatccgattttacagtgtgtggcttttaattggggcacttagcccatttacatttaaggttaatattgttatatgagaatttgatcctgtcattgtgaagtagcttgttattttgcctgttagttgatgcagtttttttcatagcattgatggtctttacaatttagcatgtttttgtagtggctcgtatggtttgttcctttccatgtttagtgcttccttcaggagctcttgtaaagcaggcctggtggtcacaaaatctctcagcatttgcttgtctataaaggattttatttctccttcatttacgaggcttagtttggctggatatgaaattctgggttgaaaattcttttctttaagaatgtcaaatattggccctcactctcttttggcttgtatggtttctgctgagagaggcactgttagtctgatgggtttccctttgtgggtaacctgagatttctctctgctgcccttaacactttttccttcatttcaactttggtgaatctgacaattatgtgtcttggggttgctcttctcgaggagtatctttgtggctttctctgtgtttcctaaatttgaatgttggcctgccttgctaggttggggaagttcttcacttcctgaagagtgttttccaacttggttccattctccctatcactttctggtacaccaatcaaatgtagatttggtcttttcacatagtccaatatttcttggaggctttgtttgtttctctttactctttttactctaaacttgtcttctcactttatttctttatttaattaatttgatatttgatcactgataccctttcttccacttggttttattgactattgaagcttctgcatgcatcatgaagttctcattccatggtttttggttccatcaggtcatttaaggtcttctctacactgttctagttagccattcatctaacctttttttcaaggtttttagctttcttatgatgcgttagaacatgctcctttagcttggagaagtttgttattaccgacattctgaagcctacttctgtcaactcatcaaagtcatgctccatccagctttgttcctttgctagtgaggagctgtaatcccttgaggaggagaggcactctggtttttagaattttcagcttttctgctctggtctctccccatctttgtggttttatctacctttcgtctttgatgttgctggcctacagttgtggttttggtgtgaatgtcctttttgttgatgttgatgctattcctttctgtttgttagtttttcttctaaccatcatgtccctcagctgcaggtctgttggagtttgttggaggttcactccagacctttttgcctgggtataaccagcggaggctgcagaacagcaaatattgcagaacagcaaatattgctgcctgctcctttctctggaagcttcatcccagagggacacccacgtgtatgaggtgtctgttggcccctactgggagttgtctcccagttaggctacacggggttcaggtacccacttgaggtggcagtctgtctgttctcagagctcaaacgccatggtgggagaagcactgctctcttcagagctgtcagatagggatgtttaagtctgcagaagttgtctgctgcctttttttcagctatgccttgccctggattctatagaggcagtaggccttgctgagctgcagtgggctccacccagttcaagcttcccagcccctttgtttatctactcaagccttagcaatggtggatgccccttcccccacctggctgcagccgcgcaagttgatcttagactgctgtgctagcagtgaacaaggctccatgggcatgggacccactgagccaggcacgggagagaatcttctagtctgcctgttgctaagaccatgggaaaagcacagtatttgagtgagagtgtcctgcttttccaggtatcatctctcacggcttcccttcactaagaaagggaaatcccttaacaccttgcacttcctgggtgaggcagtgccccacccttcttcagctcaccctccatgggctgcacccattgtccaaccagtaccaatgagatgaacaaggtaccgcagttggaagtgcagaaatcacttgtcttctgcctcaatcatgctgggagctgcagaccagagctgttcctatttggccatcttgccactaaatctctagttcttttaaatgtcatgttaggatgctgattttagatctttcatgctttctcttgtggacatttagcggtatcaatttccctctacacaatgctttaaatgtgtctcagagattctgtttcattatttctttgttctcattggtttcaaagaacattattacttttgccttaatttcgttagttactcagtagtcattcaggagcaggttgttcagttaccatgtcatcatgcagttttgagtgagtctcttaatcctgagttctaagttgattgcactgtggtttgagagactgtttgttatgacttccattcttttcatttgctcaggagtgttttacttctagttatgtgatcaattttagactaagtgttatgtggtgctgataagaatgtatattctgttgatttgggatggagagttctgtagatgtcattaggtccacttagtccagagctgtgttcaagtcctgaaaatccttgttaattttctgtgtcattgatctgtctgatattgacagtgggtgataaaatctcccactattattgtgtgggagtctaagtctctttttaggtctgtaagaacttggtttatgaatctggatgcccctgtattgggtgcatataatttaggatagttagctcttcttgttacattgtgtctggattttgttccttctggtgcgttcgtggtcttgttgacttcagaaatgaagctgtggacctttgtggtgagtgttagagcttttaaaggtgttgcagaccaaaaaagtgagtagcagcaagatttattgtggagagcgaaagaacaaagctttgacatcatggaaggagaccttagagggttgcttctgctggctgaggtggccagcttttattcccttatttgtccccacccatgtcctgctgattggtccattttaccgagtgctgattggtccattttacagggcactgattggtccatttttcagagcactgattggtccatttacagtgtgctgattggtccagtttacaaacctctagctagctacagagcactgatttgtgttttttacagagcgctgattggtgcattttacaatccttttgtaaaacagaaaagttttccaagtccccacccaacccagaagtccagctggcttcacctctcacctttaccattaggtagtggccttctttgtctcttttgatatttgttgcttaatgtctgttttatcacagactaggattgcaacccctgctttttattgctttctatctgcttggtaaatcttcctccatccctttattttgagcctatgggtgtctctgcatgtgagatgggtctcctgaatacagcacaccaataggtcttgactttttatccaatttgccagtctgtgtcttttaactagggtatttagcccacttacatttaaggttaatattgttatgtgtgaatttgatcctgtcactatgatgttagccagttattttgcttgttagttgatgcagtttcttcacagagtcaatgatctttacaatttggtgtgtttttgcagtggctggtaccaatttttcctttccatatttagtgcttccttcatggattcttgtaaggcaggcctggtggtgacaaaatctttcagtatttgcttgtctgtaaaggattttatttctccttcacttatgaaacttagtttgtctgggtatgaaattctgggttgaaaattattatttttttaagaatgttgaatattggccctcactctcttctcgcttgtcatgtttctgctgagaaatccactgttactctaatgggttttcctttgtgggtaacccaacctctctggctgctcttaatattttttccttcatatcatattttgaatattttatctgtcatttctgagttgccaatttatttagggttcattgctggggagttagtgtggtcttttggtggttttacaatattcagatatttcatggtgccagaattcttatgctggtttcttcttatttggagaggcaaccccttctgatttttgaatttttgttttctgcagatagaattgttttctctccctatttttttctttcctttttccctctcccttccaatgggggtgtaactataaagtatgttgggtagggtctttgactttaattccatagctgtgtttacttctgtgggtagttttatatcggcctgtgcagtttgacatacatgtcagtagatgggacttgtgagcaaaagccagctgcagctagcacaagtttctctagcacagcttgatccttgttttctgggggatcttctttgtttcctcaggcaatctgttcatctgtggaatgcagagtggtctgggctccctgctcagccccaggggaatcaagatgggtggcactggactgggcagtcttatctagtttccctaatgacaggcactagcaccagcactgagaaataatccagtgggcagacttgaagcccccagggttgtgctagccatggagctaagaaacctctttggctccaagtactctgcaggggtaagggaggggagagttggtggtggcctaaacttctaatccaggtgagtggatgctttgaatgcctcatgatctgtctgagtgtgaaggagagagagctcccctgcggccagatctctgtacaggaaggggagggtggctcaggctgacaatccaggtgagcaggtgctttgaatgccctgagatctgcctggatatggagcagagagggcccccttgcaccatgatctatgcacaggcacaggaagagtggggtggctcagggtgctgatccaggtgagaaatgctctaaatgcttagcagtctgcctgggtgtggagcacagagggtccttctggaccattatctataccaaggaagagtggggtggctaggactgctggtccaggcaagtagatgctctgagtgcctggagctctgctttgaggatggaatggagagggctccactcctcaatcttaggggaaaggctgaggcaccaagcaaggacacatgcagaccatttccaggtcaccaagctagtcctggctgtaaatgtcatcacccaggagaactgctgtagcagctctccttccatcccaggtctgtaatgtgggagggcccaattccagtacccactgctaaggtgctttccacaattatggctgtggaggcccctaccttcctccagaccaactgctccgatttctggcctgagactaaaatatctgcgtggccatgatgccaggctgccaaagaatgattgactttttatgctcccatattaaaagcagcatcttgctcttggtcccaggtatgggaaaatgtgtgcagcttttcctggtgtctttccctctcagcatgttcaagcctctccccaccttagctgcagggcttagaataaacaaagtgctctcccttgacctgggttgctcagatccccagttgaagggtgagtagccaggggaggctctctttcacataacgggtctgtacttacttttatcagctgaatgccatcatgaggctgtttgtccacattttcctccccaggtatcttagatgtctttcacgatttctgtggatttttcttcttgaatttaagcttacaaagttgatctttatgtactgtgctatttccaagtggctgaagcatgctaattgcctctaatctgccatcttggaaaatatggtattctttattctttagcaatgtttaatagtttttagtgtcagagtcttttattttcttgattattgttttctttgtgtattgtatgagatttttctatatatagaaacatgttatcttgaactacacatgatctgaatttttcctttcctatttggatgtgttttatttcattttcttgcatggttgctctggctagaacttccaatactatatttaatagtagtaaaagtggacatccttgttttttttcttttctttctgattttaagttataagactttagcctttcaaaatttagtatgccttagctttgcagttttcataaatatgctttattatggtaagggagttttatttatagttttatgagtatttttgttatgataggtgttgaaagttgtcatttttttctgcatctaatgagatgaacatgtttttctcttttattctaatatggtgtagtgcactggttgactttcttgttgaaccacccttgcatttctgggataaatctaacttgtttattgtgtgtaatcttttaaattttgtaaaaaatgttgtggcaaaatacacaaaaaagtttctgtattaatcattttaagtgtatagtgtattggcattgattacattcacattgttgtgcaaacatcactgccatacatctacagaattcttttcatcttacaaaatggaaaccttatacccatttaatagtaactcttggccgggcattgtagatcatgcctgtaatcccagcactttgggaggttgaggtgggcagatttcatgagctcaggagtttgagaccagcctgggcaacatggtgaaaccctgtctctaccaacaaagcagtcaacaaacaaaaccaaagtaatataatttcctcaactatgcaaactaattcatattaataattccatgaagtgtgtccatagtaacacaagatgggccttataaagttggcctatcacattctttgaggtctttgtcagtcttatgtgccagatactgtgcggactagctgcaattaaaattcccattcccttatcacttgctccgaaatttatctgaagtcaaagggaatggcttgcccaaagagaagtgtccagagacgtggatgatgtgacaagaaatgttgtagaaccccacccccacctcaaatgataactgtacatttctcctttccaccgtcccgtggcaaccaacattctactttatgtctctatgaaatcgagtatgctgggtacctcatagaagtggaatcattacatatttgcccttttgtgactggtttatttcactttgcctaatgttatgttctcagggttcattcatgttttcgcatgtgtcagatttttcttcatttccaagggtgaataatattccgttgtatgtataaaccaaatttgcttacccatttttctgttgatgggcacttggattactttcacctctggctttgtgagtaatgttattatgcatatgggtaaataaatatctctttgatgtgctgctttcaattcttttgggtatatacccagaagtggcatttctgggatatgtggtaattctatttctaattctcgaacgtcttaatgtttttcttaacagctgcaccattttacattacattcccatcagtaggacatgagggttccaatttcttcacattctcacttgttgttttcttttgttttcttagcctttatttattagatttacttattatttatttattaataatttataaatattacaaattataataatgcaaatgtataatagtaaaaaatatattataaatacgttaccataaatttatattatataacatatataaaagtatattattattgatatattataaatttataatttattattttagtgggcacaataattgtacatatttatggggtgtactgtaatatttcagtatatgtatacaatgtgtaatgatcaagcaggatgattagcatatctataacctcaagtatttttcattcccttgtgcttgaaacattaaaaatctgctcttctagctatttgaaaatatacaataaagtgttgttaattatagtcaccctacactgctatagaatactataacttttctcttttgtatagctgaagttttgtatctgttaaccaacttctggctatcccccttacttctctacctctactagctaccattctgttctctatttctgtgagattaactttcttagctaccatataagaataagaacatgcgttatttatctttccatgccaggcttatttcacttaacataatgtcttctaatctcaaccatgttgttgtgaatgatagaattttgggcttttcttattggtaattagttttccatggtgtatgtatacataccacgttttctttacccattcatttgttgatggacacttaggttgattccatatcttggctatggtgaatagtgctttaagtaaatatggaagtataactatctccttgatataacagtatcttttcatctggttatatacccaagaatgggattgctggattatatggtagttctatttttagttcttcgaggattctttatactgttttccatcatggcagtactaatttacattatcaataagtttttgagttctctttctctgcgtcctcaccagcgttggctgtcttttgtctttttgatgatagcaattctaactggagtgagctgatatctcattgtggctttgatttgaatttccttgctgatataatcataagcattttccatatacctattggccacttgtatgtctcttttgggagacgcctgttcagtttatttacccatattttaattgtagtatttgtttttttgtttctgttgaattgtttgagttacttgtatattttggatattaatcctggtcagatgaaaatattgcaaatattttctgtcattcttcaggttgtctttccactttattgaatgttttctttgccctgcagaagtttgctataatctcatttgtctaatttttacttcagttgcctgtgcttttgaagttttatccattgccaagaccaatactctgaagcatttctcctgtttttcttctagtagtttcatagtttcaggtattaatcatttcatttgttttgagtttatttttgtaaataatgagagataaaaatcttgtttcatttttctgcatataaacatccagttttcctgttgctatttaatgaaaagactgttctttcatcagtgaatgttcttggtgccttgtcaataatgtttgctataaaggcatggaataatttctgtgttctctgttctcttccatgggtccatgtgtctgcttttaggccagtataatgttattttagatattatagatttatagtaatttttgtgtgtttttaaatgtttctgggtacacagaaggtatatatatttgatgggtacatgagatcttttgatataaaaatgccatgtgtaataatcacattatggaagatggtttatctatcctctcaagcatttatcctttatgttacagacaatcgaattatactctttaagttatttaaaaatgtatgattgactaattattgactatagtcaccctattgtgctatcaaatactaggacttattcattaattataactatttttgtaccaattagaatttccactccccttcacccactcactgtccctcccagcctctggtaaccatctttctaccctgtatctccatgggctcaattgttttgagttttagatcccacaaataagtgagaacatgtgatgtttgtctttctgttcctggtttatttcacttaacataataatctccaattctatctgtgttgttgcaaatgaccgaatctcatttttttaaatggctgtatagtactccgttgtgtatatgtaccacgttttctttatccactcatccattgatgaacacttaggttgcttccatatcttagctattataaacagtgctgaaacaaacatgggagtgtagatatctcttcaatatactgatttcctttcttttggatatacctagcagtgggattgctgggtcatttggtaactttatttttagttttatgaggaacctccaaatcttgctccatagtaattgtatgaatttaaatttccacaaaaaatatatgagggttcctttttcttcacatccttaccagcatatgttattgctcatctcttggatataagccactttaactggggtgagatgatatcttattacagtttttatttgcgcttctcagatgatcagtgatattgagcactttttcatatgtctgttttccatttgtatgtcttctgttgggaaacgtctattcaaatcttttgcccactttaaaactaaattattagatttgttcctagagagttgtttgagctccttatatagtctggttgttaatcccctgttagaggggtagttttcaattattttcttcctatctgtgggttatcttttcactttattgattgtgtcctttgctgtgctgaaactttttaacgtgatataatcccatttgtccatttttactttggttggagttttctaaatctacaatcatgtaatctgcaaacagacaaaatttgattttctctcttcctgtttgaataccttttattttatttctttctcttgcctgattgccctggtcagaacttccaatattatgttaaatagaagtggtgagagagggcatccttgtcttgtgccagttttcaaagggaatgcttccatttttgcccattcagtataattttggctgtggtttgtcataaatacctcttactattttgagatacattccatcaaaatctagtttattgagagtttttagcatgaaggggagttgaattttgtcaaaggccttttctgcatctattcagatagtcatgtggtttttctcattggttatgtttatgtgatggattatgtttgtgtgtgtttgtttatttatttatttattttgagacagagtcttgccctgtcacccaggctggagtgcagtggcattatctcagctcactgcaacttctgcctttcagattcaagtgtttctcctgccttagccccctgaatagctggaattacagaggctgccaccacgcctggctaattttttgtatctttagtagagactgagtttcaccatgttggccaggctggtctcaaactcctgaccctgtgatccacccacctcagcctcccaaagtgctggaattataggcgtgagccacgtcgcccggcctacatttattgatttgcatgtgttgaacgagccttgcatcccagggatgaagccaacttgatcgtggtggataagctttttgaagtgctgctggattcagtttgccagtattttgttgaggattttcgcatggatgttcatcacggatattggcctgaaattttctttttttttgttttatgtctgccaagttttggtatcaggatgattcttcccttataaaatgagttaggaaagagtctgtctttttctactgtttggagtactttcagaaggaatggtaccagctcctctttgtacctctggtagaattcggctgtgaatccttcaggtcctgggcttttttttgcttggtgggctattccttgctgcctcaatttcagaacttgttattggtctcttcacggattggacttcttcctggtttggtcttgggagggtgtatgtgtctagaaatttatccatttcttctagattttctagtttatttgcatagaggtgtttatagtattctctgatggtagtttgtatttctgtaggatcagtggtgatatcccctttatcatttttttgttctctctatttgattcttctttcttttcttctttattagtctggctagcagcctattttgttaatcttttcagaaaattaactcctgtattctttgatattttgaagggattttcctgtctctatctccttcaattctgctctgatattagttattttttgtcttctgctaggtttgaatttgtttgctcttggttttctagttcttttaaatgtgatgttagggtgttgattttagatctttcctgctttctcctctggacatttagtgctataattttccctctaaacactgctttagctgtgtcttggagattctggtacactgtgtccttgttctcattggtttcaaagaacatctttattttgccttcattttgttatttacccagtagtcattcagagcaggttgttcagtttccatgtagttgtgcagttttgagtgagtttcttaatcccgagttttaatttgatggcactgtggtctaataggttgtttgctttaatttctgttcttttgtatttgctgatgggtgttttacttccaattatgtggtcaattttagaataagtgtgaagtggtgctgagaagaatgtatattctgttgatttagggtggagagttctttagatatctattatgcccgcttggtccagagcttagttcaagtcctggagatccttgttaaatttctgtctcattgatctgtctaatattgacagtggggtgttaaagcctccatctattattgtgtgggagcctaagcctctttgtaggtctttaagaacttcctttatgaatctgggtgctcctgtattgggtgtgtatctatttaggatagttagctcttctcgttgcattgatccccttaacattatatgataccacccctttttttaatctttgttggtttaaagtgtgttttatcagagactaggattgcaacccctgctttgttttgctttccatttgcttggtaaatattcctccatccctttattttgagcctatgtgtgtcttttcacgtgagataggtctcctgaatacagcacattgatgggtcttgactctatccaatttgccagtctgtgtcttttaattggggcatttagcctgtttacatttaaggttaatattgtgtgtggatttaatcctgccattatgatgctagctgattattttgccttttagttgatgcagtttttttatagtgttgatggtctttacaaaatttagtatgtttttgcagtggctgttcccagttgatcctttccatatttagtgtttccttcaggagctcttgtaaggcaggcttggtgatgacaaaatccctcagcatttgcttgtctgtaaaggatgttatttctcctttgcctatgaagcttaatttagctggatatgaaattctgggttgaaaattcttttctttaagaatgttgaatattggcccccactctcctctggcttgtcgagcttctccagagagatatgctgttagtctgacaggcttcccttggtggtaacccgacctttctttctggcttcccttaacatttttcctttcttttaaccttggtgaatctgacaattatgtgtcttggggttgcccttcttgaggagtatcattgtgggtgttttctgtatttcctgaatttgaatgttggtctgtcttgctagattgtggaagttctcctggataatatcctgaagaatgttttacaacttggttccattctccccatcactttcaggtacaccaatcaaacgtagatttggtcttttcacatagcaccacatttcttggaggctatgttcatttctttttattcttattttttaacttttttcttcacattttatttcattaagttgatcttgaatctctgatatcctttcttctgctttatcaatttggctattgatatttatttatgcttcacaaagttctcattctgtgttcttcagctccatcaggtcactcatgttcttctctagttagcaattcgtctaacattttttcaaggttcttagcttctttgcaatgggttagaacatgctcctttagctcagtggagtttgttattacacaccttctgaagcctacttctgtcaattcatcaaattctttctctgtccagttttgtccccttgctggcaaggagttgtgatcctttggaggagaagagatgttctggtttttgaaattttcagcctttttgtgctgttttttttttctcatatttgtggatttatctacctcttgtctttgatgttggtgacctttgaatgggttttttgcgtggacatcctttttgttgatgttgatgctattcctttctgtttgctagtttttttcctaacagtcaggcccttctgctgcaggtctgctggagtttgcttgaggtccactccaaaccttgtttgactgggtatcaccagaggaggccacagaacagcaaagattgctgtgtgtttattcctctggaagcttcgtcctagagggacacttgccagataccagccaaagctcttttgtatgaggtgtctgttgacccctgctgggaggtctgctgttctctttagagccagcaggcaggaacatttaagtctgccgaagctgcacccactgccaccccttcttccaggttctcagtacagtgagatgggagttttatctataagcccctgactgggactgttgcctgtctttcacagatgcaactgctcagagagtaggaatctagaggggcagtatggctacagtggctttgcggagctgaagtggactccacctagtcctagcttcctggaggctttgtttacactgtgaggggaaaaccacctactcaagcctcaacaatggcagactcccctcaacaccccccccaagctcgaacatccccagtcaacttcagactgctgtgctggcaaacagaagttcaagccagtggatcttagcttgctgggctccatgggggtgagatcccctgagctagatctcttggctccctggcttcagtcctctttccaggggactgaatggttctgacttgctggtgttacagcaccactggggcataaaaaaaacccctccagctatcttggtgtctgcccagatgaccacccagttttgtgcttgaaacccagggccctggtggtgtaggctctgaagggaatcttctggtctgtgggttgtgaagaccatggaaaaactgcagtatttgggccagagtgcaccgttcttcacagcacattccctcaaggctttccttggctatgggagggagttcaccaatcccttgggcttccaaggtgagacaacattcctccctgcttcagtttagcctccatgcactgcacctactgtctaaacattcccagtgagatgagccaggtacctcagttggaaatgcagaaatcacctaccttcttcattgatctcgctgggagctgctgactggagcttttcttattcagtcatcttgccagccaccctcctgattgagtttctttaaggtaattattttgaattccttttttgaatatttgtgaatttttttcattgaggtctgttatttgagagttattatgtccctttggtggtgccatatttctttatttttcatgttgtgtccctgaatttatgtctatgcatgtgatggaacaattgctattccaaaatctctagagtgaatttcatagagaaagacttttatctgaagttgagtgtttgtgtgcaggtgacgaagagtgggtaactcagtttttgatagatgcattgtgatagtatctgtgtagtttctctagctatggccaatatcagcaataattttgggtgcctcagtggcctaggttgtagaagtttgcagcagtatcaggagcagtgtaggttgttaatgtccttagtgtcaaagtatttgggcgtcctcctatttttattttcctaaaattggggtgacttagcctaagggattccttttggtgtcatctctgacatggcattaactcagcggcattggtgctgggttacaagtacagatccttgaagttgtcatagaagcatcattctagactcagggtcttttaatcatgtattgtgacacctgggtcttgcggtgcaggttcactctctgtggcagtgttgaatgtagattacccacagaaccaaggtctatgactctagcacaccttagcagctgaagcccacagactgagttgtggctgtgaatctgtttctgagggtgaggtgcaggaaaatgccgtggcctgcctctgatgtagaaggggtgctctttagatttgagcccagcaagtagaatatggctactatcattaataagataggatatactaccttattaatgctaagtaaccaagctcaagtcaagagatggaaatgttaatactggtttgtgactgcactgttcttcttacttaagagtaattttcaacatggcaagcttagaaaactgtgtgaagctgatgttaccaagggagaggactgtctttgtctacacatgttgagagaatctagtctatttcagtggtgttaactacacaatgtttaacatgacacaggtcacttggagactctaaaagcataattaatttattgctggcctagggacttgttagaaagtaatatgtttttgtatattgatgatctcttgtactcagtattcaaaactttccccttattgttgtcaattctgcatcacatcaacaccccagccctaattcaaactaagtattcctcatccattgcttccactctctgaacttccaaattttgagaactccagtctctgagtcttggcatatgccttacccttactctctcttttattccctgtgggcaattaatgtccttattctccatcttcatcattctcctttctcttcactttgtatatttttatttattcctgcactacttgcattctagaaaaagttgtctgttgcctcccatatagattacaatactgtgggcccatcttgtcattgtaaactcattctctttctctataatttattctaggttttactgtcatgttgcttttttcatatctgtttttatacaatttcaactttataatgaatctgcaggcaatattgagtccatgtacctttctgacagaagaagataattgcagactcttgtttcaggctcatagtatctaatgatatggccctaattttcctatttttattaatttaagttgtggttgtctacaggtaatagtaactttaacagaaaatgtctttatgtcttctcatttgtgttttgagaatgaaagaggaaatagaagaagtggatctagagatcttctgcttatatattttttttgccaaaaaatatgctgtgtgagtcagctaactgcagagtctgacaaatggaatttttaagcaagcatggaataagggggtaggaaataaagtttgggccagttggtctacagcatccactacaccatacagtattttttctttctttttttttttctttatttttatttttattttttttatttttatggcataagtgggattttatttattgtttatgcaaaacaaagtagccggtataattagacagtcatttgtaacttccaacataaacattttaggaacagtagtatcaaaagtgagtgctaattagagagctgttagagaaaatataagtggtaacagattaacaaactataccaaacagcaggctatttataactccatgctgttttaaattctcttttgtttaacagtctttgtactacttatttatttttttaatttttacaaaaacataaggaaaatgtagtctctttctttttttttttattatactttaagttttagggtacatgtgcacattgtgcaggttagttacatatgtatacatgtgccatcctggtgcgctgcacccactaactcgtcatctagccttaggtatatctcccaatgctatccctcccccctccccccaccccacatcagtccccagagtgtggtattccccttcatgtgtccatgtgatctcattgttcaattcccacctatgagtgagaatatacggtgtttggttttttgttcttgtgatagtttactgagaatgatgatttccaatttcatccatgtccctacaaaggatatgaactcatcattttttatggctgcatagtattccatggtgtatatgtgccacattttcttaatccagtctatcattgttggacatttgggttggttccaagtctttgctattgtgaataatgccgcaataaacatacgtgtgcatgtgtctttatagcagcatgatttatagtcctttgggtatatacccagtaatgggatggctgggtcaaatggtatttctaattctagatccctgaggaatcgccacactgacttccacaatggttgaactagtttacagtcccaccaacagtgtaaaagtgttcccatttctccacatcctctccagcacctgttgtttcctgactttttaatgattgccattctaactggtgtgagatgatatctcattgtggttttgatttgtatttctctgatggccagtgatgatgagcattttttcatgtgttttttggctgcataaatgtcttcttttgagaagtgtctgttcatgtcctttgcccactttttgatggggttgtttgtttttttcttgtaaatttgtttgagttcattgtagattctggatattagccctttgtcagatgagtaggttgcgaaaattttctcccatgttgtaggttgcctgttcactctgatggtagtttcttttgctgtgcagaagctctttagtttaattagatcccatttgtcaattttgtcttttgttgccattgcttttggtgttttggacatgaagttcttgcccatgcctatgtcctgaatggtaatgcctaggttttcttctagggtttttatggttttaggtctaacgtttaaatctttggccgggtgcggtggctcacacctgtaatcccggcactttgggaggccgaggcgggcggatcacgaggtcaggagatcgagaccatcctggctaaaacggtgaaaccccgtctctactaaaaatacaaaaaattagccgggcgtagtggcgggcacctgtagtcccagctacttgggaggctgaggcaggagaatggcgtgaacccgggaggcggagcttgcagtgagccgagatcccgccactgcactccagcctgggcgacagagtgagactccatctcaaaaaaaaaaaaaaaaaaaaaaaatctttaatccatcttgaattgatttttgtataaggtgtaaggaagggatccagtttcagctttctacatatggctagccagttttcccagcaccatttattaaatagggaatcctttccccattgcttgtttttctcaggtttgtcaaagatcagatagttgtaggtatgcggcgttatttctgagggctctgttctgttccattgatctatatctctgttttggtaccagtaccatgctgttttggttactgtagccttgtagtatagtttgaagtcaggtagtgtgatgcctccagctttgttcttttggcttaggattgacttgatgatgcgggctcttttttggttccatatgaactttaaagtagttttctccaattctgtgaagaaagtcattggtagcttgatggagatggcattgaatctgtaaattaccttgggcagtatggccattttcacaatattgattcttcctacccatgagcatggaatgttcttccatttgtttgtatcctcttttatttccttgagcagtggtttgtagttctccttgaagaggtccttcacatcccttgtaagttggattcctaggtattttattctctttgaagcaattgtgaatgggagttcactcatgattcggctctctgtttgtctgttgttggtgtataagaatgcttgtgatttttgtacattgattttgtatcctgagactttgctgaagttgcttatcagcttaaggagattttgggctgagacgatggggttttctagataaacaatcatgtcgtctgcaaacagggacaatttgacttcctcttttcctaattgaatcccctttatttccttctcctgcctgattgccctggccagaacttccaaatcaacagaatatacatttttttcagcaccacaccacacctattccaaaattgaccacatagttggaagtaaagctctcctcagcaaatgtaaaagaacagaaattataacaaactatctctcagaccacagtgcaatcaaactagaactcaggattaagaatctcactcaaaactgctcaactacatggaaactgaacaacctgctcctgaatgactactgggtatataacgaaatgaaggcagaaataaagatgttctttgaaaccaacgagaacaaagacacaacataccagaatctctgggacgcattcaaagcagtgtgtagagggaaatttatagcactaaatgcccacaagagaaagcaggaaagatccaaaattgacaccctaacatcacaattaaaagaactagaaaagcaagagcaaacacattcaaaagctagcagaaggcaagaaataactaaaatcagagcagaactgaaggaaatagagacacaaaaaacccttcaaaaaatcaatgaatccaggagctggttttttgaaaggatcaacaaaattgatagaccactagcaagactaataaagaaaaaaagagagaagaatcaaatagacacaataaaaaatgataaaggggatatcaccactgatcccacagaaatacaaactaccatcagagaatactacaaacacctctacacaaataaactagaaaatctagaagaaatggatacattcctcgacacatacactctcccaagactaaaccaggaagaagttgaatctctgaatagaccaataacaggagctgaaattgtggcaataatcaatagtttaccaaccaaaaagagtccgggaccagatggattcacagccgaattctaccagaggtacaaggaggaactggtaccattccttctgaaactattccaatcaatagaaaaagagggaatcctccctaactcattttatgaggccagcatcattctgataccaaagccgggcagagacacaaccaaaaaagagaattttagaccaatatccttgatgaacattcatgcaaaaatcctcaataaaatactggcaaaccgaatccagcagcacatcaaaaagcttatccaccatgatcaagtgggcttcatccctgggatgcaaggctggttcaatatatgcaaatcaataaatgtaatccagcatataaacagagccaaagacaaaaaccacatcattatctcaatagatgcagaaaaagcccttgacaaaattcaacaacccttcatgctaaaaactctcaataaattaggtattgatgggatgtatttcaaaataataagagctatctatgacaaacccacagccaatatcatactgaatgggcaaaaactggaagcattccctttgaaaactggcacaagacagggatgccctctctcaccgctcctattcaatatttttttctagtactatactttacagtttctatgttggtaagtatacaatgtgagtaattttgaatttactgtcatcaaatatgctgttaaataatttgtcagataattgcatcaaatcattcctaggaaaagcaaaaccaacagtctgaattcactattgaaaacttggtaatcactgcagctgacttacttggagctgggacagagacaacaagcacaaccctgagatatgctctccttctcctgctgaagcacccagaggtcacaggtatgatcacagaggatgagttaattgagttttaggaaagatgttgggaaggtgctgctagtgttctcctttctgtttctcttagagaagttccattatttaaatttctgtgcccgcagctgtaatctgtcccaatttaatggtgtgattaaaatggaatatcctggcctggtgcagtggctcatgattgtaatcccagccctttgggaggcctaggtgggtggaccattgaggctaggagttcaagaccagcctggccaatatggccaagccccatctctactaaaaatacaaaacgtagccgggcattgtggcacaccactgtaatcccagctacttgggggctgaggcatgggaatcgcttgaacccgggtggtggaggttgcagtgagccaagattgtgccattgcactctagcctgggtgacagagtgggaccctgtctcagaaaagaaaaaaaaggaaaagaaaagaaaagaaaaaaaggacatctttgcacagtagaggaagataactgagagaaatgaagacagcatggcagtttcaaaagcaatagagctctggcccagtgtgtctggatttcatcgacagtgacttatggcaggaagagacaacataagttggcctgggattgcatgttggttttattattaaaaggccattttgaacagcaagtgtattgttaaagataatttttctcattctcaaaacttcaggttcaaatgctggagtagggaaaatggaaactcttcttattgaaggataaatggtaatcctagaaatgtagtgaggctgcctgaaaaaattcctagtctgataagtattctaaaaagttagattcatgagaaagttgattctgtttactaaaagaggtacctaaagaatgttccatttaggcagaagatgtacctgagacagtttctgtgaaattggtgttggataaaataagaatatttttgggggggccaataattttatcttttatgaacaactttactttagaaattttaaagactttcggttatgctgcagataataaatattcttttttcccctgtgtcagtatcccccatttaatgacaataacctaattacaaataagagttaggcctttttttgaacaattactaacctataacgttctagaagattttttcaacttttttttatagattaaagggtaaaaatacagatttgttacatgggtaaattgtgtaacactgagtctcggggtcccaactatttcatcaccctggcagtaagcatagtacccaacagatggttctccaacccacatcccttctctccctcccctatatagtgatcctcagtgtctattgttcccatctttaggttcatgtgtattcaatgtttacttcccatttataagtgagaacaggtggtatttggttttctgttcttgtattagattgcttaggataatggcctcctgcttcatctatagtgctgcaaaagacatgatttttgttcttttttatggctgcatagtattccatggtgtatatactagtctgttctcatgctgctaataaagacatacctgaggctgggtaattcataaaggaaagaggtttaatggactgtcaattccacatgactggaaaggcctcacaataagtctctgatagcaagacttatttactatcacaagaacagcatgggaacaccctgcccccatgattaaattatgtcccattgagtccctcccatgacatgtgggaattatgggagccaaagtccaagatgagatttgagtggggacacagtctaaacatatcagtgtatatttaccacattttccttatacagtctactgttgatgggcacttaagttgattccatttttttgctattgtgaatagcactacagtgaacatattggtgtgtgtgtctttttgatagaatgaatttttttgggggggcatatactcaatagttggattgctgggtcaactaaagttctattttaatttctttcagaaatatccaaactgctttccacagtgactgaactagtttgcatacccaccagcagtgtaaaagcattttcttttgtctgcaacctcaccagcatctcttgtttttggactttttaatattaataattgccattctgactggtgtgagatggtacctccttgtgattttgatttggatttctctgatgattagtgatgttgaacattttttcatatgtttgttggctgcttgtatgtcatcttttgagaagtgtctgttcatgtcctttcaccatttctaattttttttttgttttttgcttgttaatttgttttagttttttatagatttgggatattagctgtttgagccctttaagctatgtagagtacaggcaatagtcaataaagctttaacaaatttctaaaacacagagagcaaatggaggaataataaatcagtacagagaggataaacttgtaaccaaaaagtcagaagaggaaaatttatcaaggagaaaaattaatcagtgtcccttaagtcccctcaatattagtatttggaagtgccaagggtcaaatatggtagagaatgaggttgaaaaacgaggctctctctgcctaggtttcctacacaactcttttcatcaagtaactaattttctcccacaagaaaaaggaggcttactctctagagaaactgagtttaagaagccccatactcagggacaaagggcagtgccagaaaagacatgaggtgtaggctagaaaggcagatttggtaagggtccacaccttcaattcagagacttaaagctcttttattcatcttgcttcctaaaattcagcagctagcgttatcctacagaaagggaactgatctagagaaatgacatttttcttttgccatcttaacagaaaattatcttcaatgtctaacagagtgaatgaaatgaaaacatactctgctagacacagggtcatggaatttcaggacaccagaattaaagggaaaatcacaaaaactttcagagctataccaggtcatattgaaagaattaggattcagaattctcaagaggaactattaatattatttagcatattaatagaaatagtgtgttttcagacttgcacatttgccaaaattttaccttctattgtccctttctcagaaaaatattggagaatgtgcttaattcaaatgcctgaagcctagttatagaaagtcctgagctccagcaatcagacctcatataggacaatgagagtgtcagggaggctgccttgcaccaggcctagaaaacaactacttcagaatgaacctggtggataattcagaagtgagatgagacagcaagaacaagagatgtgacagattttatgagagtttccaataactaaaaaggagtttcaaacatctgcctgaacatttgtaagtatttctaacttgggaaacagaaaattacaaatagaaataaagagatgtggttaagtttaagaaagtgctaaaaataaaatataatcatagctgtcttaccagagaaccatatttatgtagtcagaatgatataagcaatgaatactgatatcataaaaattgtcatctaaatatattctggaaaaagcagtgtggaaaaattagtgtgtctatctgagggtgtgttcaaatatgaggtgaacatggagattaaaattttcatctcataataaaaaattattaaatataatctacaaaaagataagtaagaaatagaaacaaggtctttatttagaaacgtgaatgtattttcagaagaagctgctagaatgttcaaaatggtagatttggaaagtgtgagaatgaagagaataccattgcaaattgcagactctcacacacacaagcacagctgcacaaatacacagttatatatatgcgtaaatctgttagcataacttaatgtttaaacgtgttattttgatgtaaaattaattcctgtttttttccaagacagtaatttcatgactaaatttatgcttactttatgttttcaaacatttcatttttttaattatactttaagttttagggtacatgtgcacattgtgcaggttagttacatatgtacacatgtgccatgctggtgcacggcacccactaactcgtcatctagcattaggtatatctcccgatgctatccctcccccctccccccaccccacatcagtccccagagtgtgatattccccttcctgtgtcaatgtgatctcattgttcaattcccacctatgagtgagaatatgcagtgtttggttttctgttcttgtgatagtttactgagaatgatgatttccaatttcatccatgtccctacaaaggacatgaactcatcattttttatggctgcatagtattccatggtgtatatgtgccacattttcttaatccagtctatcattgttggacatttgggttggttccaagtctttgctattgtgaataatgccgcaataaacatacgtgtgcatgtgtctttatagcagcatgatttatagtcctttgggtatatactcagtaatgggatggctgggtcaaatggtatttccagttctagatccctgaggaatcgccacactgacttccacaatggttgaactagtttacagtcccaccaacagtgtaaaagtgttcctatttctccacatcctctccagcacctgttgtttcctgactttttaatgatcaccattctaactggtgtgagatggtatctcattgtggttttgatttgcatttctctgatggccagtgatgatgagcattttttcatgtgttttttgactgcataaatgtcttcttttgagaagtgtctgttcatgtcctttgcccactttttgatggggttgtttgtttttttcttgtaaatttgtttgagttcattgtagattctggatattagccctttgtcagatgagtaggttgtgaaaattttctcccattttgtaggttgcctgttcactctgatggtagtttcttttgctgtgcagaagctctttagtttaattagatcccatttgtcaattttgtcttttgttgccattgcttttggtgttttagacatgaagtccttgcccatgcctatgtcctgaatggtaatgcctaggttttcttctagggtttttatggttttaggtctaacgtttaagtctttaatccatcttgaattgatttttgtataaggtgtaaggaagggatccagtttcagctttctacatatggctagccagctttcccagcaccatttattaaatagggaatcctttctccattgcttgtttttctcaggtttgtcaaagatcagatagttgtagatatgtggcgttatttctgagggctctgttctgttccattgatctatatctctgttttggtaccagtaccatgctgttttggttactgtagccttgtagtatagtttgaagtcaggtagtgtgatgcctccagctttgttcttttggcttaggaatgacttggtgatgcgggctcttttttggttccatatgaactttaaagtagttttttccaattctgtgaagaaagtcattggtagcttgatggggatggcattgaatctgtaaattaccttgggcagtatggccattttcacaatattgattcttccgacccatgagcatggaatgttcttccatttgtttgtatcctcttttatttccttgatcagtggtttgtagttctccttgaagaggtccttcacatcccttgtaagttggattcctaggtattttattctctttgaagcaattgtgaatggtagttcactcatgatttggcactctgtttgtctattgttggtgtataagaatgcttgtgatttttgtacattgattttgtatcctgagactttgctgaagttgtttatcagcttaaggagattttgggctgagatgatggggttttctagatatacaatcatgtcatctgtaaacagagacaatttgacttcctcttttcctaattgaatcccctttatttccttctcctgcctaattgccctggccagaacttccaacactatgttgaataggagtggcaagagaaggcatccctgtcttgtgccagttttcaaagggaatgcttccagtttttgcccattcagtatgatgttggctgtgggtttgtcatagatagctcttattattttgaaatacatcccatcaatacctaatttattgagagtttttagcatgaagggctgttgaattttgtcaaaggccttttctgcatgtagtattgagataatcatgtggtttttgtctttggttctgtttatatgctggattacatttattgatttgcgtatattgaaccagccttgcatcccagggatgaagcccactcgatcatggtggataagctttttgatgtgctgctggattcggtttgccagtattttattgaggatttttgcatgaatgttcatcaaggatattggtctaaaattctcttttttggttgtgtctctgcccggctttggtatcagaatgatgctggcctcataaaatgagttagggaggattccctctttttctattgattggaatagttttagaaggaatggtaccagttcctccttgtacctctggtagaattcggctgtgaatccgtctggtcctggactctttttggttggtaagctattgattattgccacaatttcagctcctgttattggtctattcagagattcaacttcttcctggtttagtcttgggagagtgtatgtgtcgaggaatgtatccatttcttctagattttctagtttatttgcatagaggtgtttgtagtattctctgatggtagtttgtatttctgtgggatcggtggtgatatcccctttatcgttttttattgcgtctatttgattcttctctctctttttctttattagtcttgctagtggtctatcaattttgttgatcctttcaaaaaaaccagctcctggattcattaattttttgaagggtcttttgtgtgtctctttccttcagttctgctttgattttagttatttgttgccttctgctagcatttgaatgtgtttgctcttgcttttctagttcttttaattgtgatgttagggtgtctattttggatctttcctgccttctcttgtgggcatttagtgccataaatttccctctacacactgttttgaatgcatcccagagattctggtatgttgtgtctttgttcttgttggtttcaaagaacatctttatttctgccttcatttcgttatgtacccagtagtcattcaggagcaggttgttcagtttccatgtagttgagcggttttgagtgagtttcttaatcccgagttctagtttgattgcactgtggtctgagagacagtttgccataatttctgttcttttacatttgctgaggagagctttacttccaactatgtggtcaattttggaataggtgtggtgtggtgctgaaaaaatgtatattctgttgatttggggtggagagttctgtagatgcctattaggtccgcttggtgcagacctgagttcaattcctgggtatccttgttgactttctgtctcgttgatctgtctaatgttgacagtggggtgttaaagtctcccattattaatgtgtgggagtctaagtctctttgtaggtcactcaggatttgctttatgaatcttggtgctcctgtattgggtgcatatatatttagcatagttagctcttcttgttgaattgatccctttaccattatgtaatggccttctttgtctcttttgatctttgttggtttaaagtctgttttatcagagactaggattgcaacccctgcctttttttgttttccattggcttggtagatcttcctccatccttttattttgagcctatgtgtgtctctgcacgtgagatgggtttcctgaatacagcacactgatgggtcttgactctttatccaatttgcaagtctgtgtcttttaattggagcatttagtccatttacatttaaagttaatattgttatgtgtgaatttgatcctgtcattatgatgttagctggttattttgctcgttagttgatgcagtttcttcctagactcgatggtctttacattttggcatgattttgcagcggctggtaccggttgttcctttccatgattagtgcttccttcaggagttcttgtaaggcaggcctggtggtgacaaaatctctcagcatttgcttgtctgtaaaggattttatttctccttcacttatgaagcttagtttggctggatatgaaattctgggttgaaaattcttttctttaagaatgttgaatattggcccccactctcttctggcttgtagagtttctgccgagagatctgctgttagtcagatgggcttccctttgagggtaacccgacctttctctctggctgcccttaacattttttccttcatttcaactttggtgaaactgacaattatgtgtcttggagttgctcttcttgaggagtatctttgtggcgttctctgtatttcctgaatctgaacgttggcctgccgtgctagattggggaagttctcctggataatatcctgcagagtgttttccaacttgtttccattctccccatcactttcaggtacaccaatccgaagtagatttggtcttttcacatagtcccatatttcttggaggctttgctcatttctttttattctttttactctaaacttcccttctcgctacatttcatcttccattgctgataccctttcttccagttgatcgcattggctcctgagacttctgcattcttcacgtagttctcgagccttggttttcagctccataagctcctttaagcacttctctgtattggttattctagttataccttcttctaaatttttttcaaagttttcaacttctttgcctttggtttgaatgtccttccatagctcagagtaatttgatcgtctgaagccttcttctctcagctcatcaaagtcattctccatccagctttgttccgttgctggtgaggaactacgttcctttggaggaggagaggcgctctgctttttagagtttccagtttttctgttctgttttttccccatctttgtggttttatctacttttggtctttgatgatggtgatgtgcagatgggtttttggtgtggatgtcctttctgtttgttagttttccttctaacagacaggaccctcagctgcaggtctgttggaataacctgccgtgtgaggtgtcagtgtgcccctgctggggattgcctcccagttaggctgctcaggggtcaggggtcagggacccacttgaggaggcagtctgcgcattctcagatctccagctgcatgctgggagaaccactgctctcttcaaagctgtcagacagggacatttaagtctgcagaggttactgctgtctttttgtttgtctgtgccctgcccccagaggtggagcctacagaggcaggcaggcctccttgagctgtggtgggctccacccagttccagcttcctggctgctttgtttacgtaatcaagcatgggcaatggcgggcgcccctcccccagccttgctgccaccttgcagtttgatctcagactgctgtgctagcaattagtgagactccgtgggcgtaggaccctccgagccaggtgcgggatataatctcgtggtgcaccgttttttaagcccatcggaaaagcgcagtattcgggtgggagtgacccgattttccaggtgccgtctgtcacccctttctttgactcagaaagggaactccctgaccccttgcacttcccaagtgaggcaatgcctcgccctgcttcggctcccgcagggtgcacgcacccactgacctgcgcccactgtctggcactccctagtgagatgaaccgggtacctcagatggaaatgcagaaatcacccatcttctgcgtcactcatgctgggagctgtagaccagagctgttcctattcagccatctttgctcctccccacatttcattatttttatttatattacttatatatactaacgtatatgtacatacagatttatcttttttccttttttattttttatatttatgggtacagagtaggtatatattaatatgtttgtggggtacaggagatgttttgatacaggcatgcaatgtgaaataagcatgtcatggagaatggggtatctgtgccctcaagcatttattgagttacaaacaattcaattacactctttcagttattttaaaatatacaattaagttattattgaccatagtcacactgttgtgctatcaaatagtaggtcttattcatccctacttcccttctcaccccccacttccctttcaagtatctggtagccatccttctacactttatgtccattagttaaattctttttattttagatcccacaaataagtgagaacatgctatgtttgtttttctgtacctggcttatttcacttaacataatgctctccaatttcattcatgttgttgcaaatgactgaatctcattctttttttatggctgaatagaactccattgtgtatatgtactacattttctttatacatttgtctgttgatggatatttaggttgtttcaaagtcttagccattgtaaacagtgctgcaacaaacacaagagtgcagatgtctctttgatatagttatttcctttcttttgggtatatacccagtagtagggttgttggtagttttatttttagttttttaaaaaacttacaatatatatttttagttttttgaggaacattcaaacagctctccatagtggtcatactaatttacattcccaccaacgttgtacaagggtccacttatctccacatcctcactagcatttgttattgcctgtcttttggatataagccattttaactggagtgaggtgacatctcattgtagttttgatttacatttctctgatgatcagtggtgttgaccacctttttgtatgtctgttaacaattaacatgtcttcttttgagaaatgtctattcaaatcttttgcccacttgtggacttgattattagatttttttctatagagttacttaagttccttatatattctggttattaatctcttgtcagatgagtagtttgcatatatttttctccattctgtaggttatctcttccctttgttgattgtatcttttgctgtgcagaaactttttaacttgatatgatcccatttgtccatgtttgctttgaatgcctgtgcttgtggggtattgctcaagaaatttttgcctagaccaatgtcctggagatgttttctagtattttcctatagtattttcacagtttgaggtctcatacttaagtttttaatccattttgagttgatttttgtatgtggcaagatatatgagtccagattcatccctctgtgtaggatattaaattttcccagcacaatctattgatgagatggtctttcccccagtgtacgttcttggtacctgtgttagtctgttcttatgcttctaataaagccatacacaagaccgggtaatttataaagggaagatgtttaatggactcacagttccacatggctggggatgcctcaaaatcatggtggaaggcaaatgaggagaaaagtcacatcttacatggtggcagacagagatctttgcaggggaagtcccatttataaaaccatcagatcttgtaagacttattcactaccatgacaacagtatgggggaaaccaccccatgtttcaattatccccacatggccttgtacttggggtgtggggattattacaattcaagatgagatttggggtggggacacagccaaaccatgtcagcacctttgtcaagaatgagttcactctaggtgtgtgaaattgtttctggattcactattctgttccattggtctatgtgtctgtttttatgtcagtaccatgctgtttttgttagtatagctgtgtagtataattttaagtgagataatgtgattcctccagttttgttttttttgcttatgatagttttgactattctgggtcttttgtgggtccatgtcaattttaaagattttttttctatttctgtgaagaatgtcatttgtaatttgatggggattttattgaatctgtggattgttttgatagtatggacattttaataatattgatttttccaatccatgaacatgaaatatttttccatttgttgtgatctcttaaaactctttcctcagtgctttatagttttcattacagagatctttcagttctttggttaaattaattcctaggtattttattttatatatggctattttaaatgggattacattttaaatttctttttctcattgttcactgttggcatatatcaacactactgatttttatgttgagtttgtatccttcaactttacagaatttgttcatcagttctaataattatcttgtggaatctttaggtttttcctagtataaggttatatcatctgcacacaaggatattttgacttattcctttctaatgtggatagcctttatatctttctcttgcctgattgctcttgctaggtcatctagtagtatgaagaataacaatggcaatagtggacatccttgtcatgttcatgatcttacagaaaatgctttcagttttccccactcagtatggtactagtagtaggtctgtcatatagctttttttatgttgaggtatgttccttctatctcaagtgtttttttttctttttttttattatactttaagatttagggtacatgtgcacattgtgcaggttagttacatatgtatacatgtgccatgctggtgcgctgcacccaaatgtccaacgatgatagactggattaagaaaatgtggcacatatacaccatggaatactatgcagccataaaaaatgatgagttcatgtcctttgtaggaacatggatgaaattggaaatcatcattctcaagtgtttttaatgaatttttatcatgaagggatgttgaattttatcaaatactttttcagcatcaactgaaatgatcatatggtttttatccttcattctgttgatatgatgtatcacactgcttgatttccacatgttgaaccatccttgcatcccagaggtaaatcccacttggtcattgtgaatgatctgtctattgtattgttgaatgtggtttcctagtattttgttgaggattgttgcatcagtattcatcaggtgtattggcctgtagttttctttttttgatgtgtcttagtctgattttggtatcagggtaatactggcttcatagaatgagtttggaagtattctcttctcctttattttttggaatagtttgagtagggttggtattagttctttgttaaatgtttggtaaaattcagcagtgaagccatcaagtcttggggttttccttattgggataatttttattacaggtttgatcttggtactggtcattgcatgttcaggttttggatttcttcctggttcaatctcaataggtcatatatgtctaaggatttgtccatttcttctagattttccaatttattggcatatagttgctcatagtaaccactaattattctttgaatttctgcagtatcagttgtattgcttccttttttatttttgtttttatttatttgaaacttcttttttttcttagtctggctaaaaacttgtcaattttgtttaatttctcaaagaaacaactttttgttgcattgacattttgttttgttttcttcatttaaatttcatttatttctgctctgatctttattatttcttttgttctactaattttggttttctttcttttttcttttttttttttgtgcagttgcaagatttaataggctgaaacagagctcccatacaaagggaggggacccaaagggggttgccattgctggctcaaatgcctgggtttatatcccaatcattgtccctcccactgtgctttcaggcagcagatgattggctatttctttacctcctgttttgcctaattagcattttagtgagctctccttactatctgattggtcatgtgtgagctaagttgcaagccccgtgtttaaaggtggaagtggtcaccttcccaggtaggcttagggattcttagtcagctaggaaatccagctagtcctgtctctaagtcccccatctcaacatgaaaacccaagtgctgttggggaggttggccgacgactgctctagctgcttcctgctgaattggggtgtagtaggggtggtgcagttgagatttcctcgggagaggtgccttcaatgtcattaacattggagcatgagctagcaggctggtccaagggtctgcagtagatcttagccatggactgcatctggggctccatttgaagaatgatttgtagttttacagcttcaattctggaagagacacacttaacaaggaggttaaagatacagggattgaaatgtatggcctgcagtgcctttgacacacttcacaggccctgactatctgcttgatagttttgaaaaggcctggtccagtaaataataatttggccatctgatgggtgctatcaatacctaagtgaaaggtttggtgaagggttttaagtaattcccattggttagctgcaggcaaatgtaattttccttttttggtggctagccatcccgaggggagaaaactatgtcttcatgaggttacccattctatttctcctgctgagtattggggcttggtttcccggaggggattaccccatactaggggtccttctataagcatttctaatggagggttctgccttgcagctcttttggcctcaatatctgcttggcggttcccttctattttcctttcctttcctttctgatgaccccagcagtgtaagactgccacctctttaggtttctgtacagccaataataatctcctaacggcttcctgaggtttgatagatgttccctcggaagttaggaatttcctttccctccatattgcttcatggacatggaagactaggtaagcatacttagatctgtatatatatatttaccctttttccttttcctaattctagtgcccgagtgagggctattagttctgccagctgagcactagttcctggtgtgaggagattactttcaagtattccattatcactgaccactgtgtacctcgctttttgaagtcctttttctacaacggaacttccatcagtgtacaagttgaagtcaggatcagtcaagggaacctctaaaagttcccctcgagtggtgtaggtttgagcaattacttgttgacagttatgttctatcttttctttattatttggaagaaatgtggctcagttaagagttgcacaagcacgcagttgcagcactggctcttcaagtaatagagcctgatatttaagtaagtggttgtctgacagccacaagtctcctttagcagtgagtatgccattcacatcatggatgcccacacagtaagatctcttccttgtattcttttaacttcttcagatactaagcctgctactgctgccactacctgtaaaccatgaggccaaccctttgccactacatcagtttccttactcaggtatgccacgggttgcaagctcatcccttggacctgtgtaaggactcctagagctattcctgttttttttctgtgttatataaagaaaagtcttgccctgttggcaagcttaacactgagtcttgggttagagacttctttagggcctggaaagccacttctgtttcaggtgtccatcttactaaatggatattgactttctgagtttccttaattagtgtatataatggtctgtctatttcaccatacctgggaatccacattcagcagaaacctgttatgccaaggaaccctcttagttgctttatggttttgggatgaggataagccagaataagctggatacgttcctcactgagggccctggtgcctttggataattttagccctaagcatttaacctgctgtgagcagagctgagcctttggtttggaaatcttgtagccacaggtagtgaggaaatttaagagcgcttgggtggcttgatggcacaaggtttctgaacaggcagctaaaagtaaatcatccacgtactgaaggacaagagtgtccaggtatgagaattgactcaagtcttgggctaatgcctggccaaatagatgggggctatccttgaacccttggggtaaaacagtccaggtgagttgagatgttgggtttcaaagatcttcaaaggcaaacaagaattgagagtcaggatgtacagggatgcagaaaaagtcatccttaaggtccaggactgtaaaccactctgcttcctctggtatttgggaaagcagagtataagggctgggtacagctgggtatagagggacaacagcctcactgataatcctagatatttcactaacctccactgtccattgggtttctgtactcctaaaattggagtattgcaggggctattgcatggttttactaggccttgggcttttaggtccttaacaatcttttggagtccttgttgggccttgggtctgagggggtgctgcctttggtagggaaaggaggtggagtcctttagtttaacttgaacaggacaggcattctttgctcatccatattgtccttctgttgcctagactttaggattaattccttcctcaagcaggggacaaccaatgggtgttccttctcctatgttcaggtgtataatggcccctggttttgctagaatgtctctccctaacaggggagtggggctttcaggcataattagaaaagcatgtgaaaagagtaaagttcctcagtcacagcttagtgactgggagaagtatctagtgactggctgtcctaggaccccttggatagtgacagatctggaggacagttgtccgagacaggagagtaagactgagaaggttgcaccagtgtccaggagacagttaacctcctggccctcaatggtcaagcatacccggggttctgtgagggtgatggcatgggctggggcttgccccaggcaccctcagtcctgctgctggatcatctggttagtggcttctgactcagaggaccttcatcccctggggcagtggcccttccagtggattcccttgacataaggggcatggacgagggggcagcttacttctacttggacaatcttttttaaagtgtccttgtagactgcactggaagcaagccctattagacatataattttcccaacttttcccttttccagagcctccaatgtccacttgcctggtatgcttcctcaatgcctcccttagtctctccagaaaggcagtaggattttcttcctttccctgtgttatagtggacatcattgaataattcatagtcttcctagttttccttagtccttctagcacgtaagttagcaaatgtctgtggcaccaatctccatgttctgattctgtgtcccagtgagggtctacactgggaactgcctgctggcctgtggggaatcattctctttcctctgatgtcatcctatcattgacctgactgagataccagagattgccaaactcttgggctgcagatatggtggcaattctctcatttggggttagtgtctgatttagcagtaacattgcatctctccatgtcagatcaaaggattgccctaacccttataaaacatcaatatagccatcagggttatctgatctaaaatacctaggtctattttaatttgctttaagtctgagagagaaaaaggtacatgcactctggctgggccgaattctcctcctccctctgcttggagggggcataatcagggaatattggcactctttggttcattatttacccctttatctatctctttttggacggtttgtgttgaagggggatccttgttagctggggaaggagtcagggggacactgggatagggaggtagactgagggcttcctgtagggcataaatcacactttttacataattgcgagttgtctcttaatgaaaagaaagttgtacatatggcacttcactccatttgcctttttcctacaaaagaggtctagctgtaagatggtgttataatttatacttccctcaggaggccaggtttctcccccttgaagaggatatcatggccaggcggtactgcagaaaaatataagtcatttctttctttgaccctttcttagagggtcaaattggtcctaattctccagaatacatcttaggggtgtttttgccttgggggaaatgtttcccatctgaaaaaagaacatagggaagccaacacccctagtcattttctgatgagcataagtcctagagcatcctctatggtcctaatgcttattcctttccagggtgcataaccacccatggacctctgcttatcggattacttacactcaccgatgtagcagtcctgcatctgtttttccatctctcttgaccacaaagaaaggggccctggctgctggattctagtggtcctttaccagcttgcccaacattgcctttgcactcagaggtgagttcctttccaggctgtataaccacccatggacctctgctaatcggattacttatgcttaccgatgtagcagtcctgcaactgtttttcctgcctttcttgaccacaaagaaaggggtccgggctgctgggttctagtggtcctttaccagcatgcctaacattgcctttgtactcaggggtgagtcctagagctgggctgggttcctgagtatttcataacaacccagctgccccatcaacatgcattcgcataaacaacagttcttatgcaaatttgtttcagagagggtgtattgaatcttttgagtcaggattgagatagtcttttgattctgtaagtactttaagtcttggctgagtgcaaagagttcgcacttttgaggagaccaattattaggcaatttttctaaatctgcttccacaagagtctctgtatcaattactgaatgtccattgaggttttttcctcagtcacctgggaggaaccatctatcatcctgtcctgaagggagttcctcctatgtctggtcggactgttgtatggtaattaagatttaaatccctgttagggaatctgctgggttaagggaattatcagaggttggagttacgttacctttttctaaccttatagccccatacgttaagatttttgagttagtgagctacctttttgcttttttttatttttttttgactaagaataactctgaactggtgaggtgtgctcacaatgaggtttcctctaaaagttacttttctacttttagttaagtagttgtttctaccgactgaatgcatttggcccatccgcgggttactgggttaaggatttaatacgcctttatttacactgacaacaaagtggcaattaccaattacaggttttaaatttaccctggcttttaaaggaatggggcacactttttttttttttaactatttctatctttttctttctttttctctttgactccctctttgtctctctctctgtctctctctctcttagccattacaaacttggggccctggcaagtgtggtggggaatgggtcccacgtaactgcccatgtcgagagctgtatacctaaatcaggagggataccagggataagactccctgggttatagcctaggtgcctaaggatgcagcgtagagactccttagatccctttagagatacaacttgctagaggaaatgaaagtctgaaacattagtacctaggaggcagggatcagaggaagtagattcagaggtaaggagaattttggggctacactttaaagaaagtcgtggtcaggacccaggaggtatgggtcagaaggaaaggtaggggcgcacgcatgtgtgacaggtgagtagagacttctggctgcgccatgatctcaaccggctactgccaggagttcgggacaacagctttctgcctctagtcagccctcagcttccccaagaaaattggaagtggaagctggctccaggcagaccaacattcccaatagaagggttggttgttagaaagcccttccccagataaccttacacctgagtcttcagtctggtggccacgctaatcatttttaactggccgacaggtgcctggtattttcctccagttctaaggaaggataggacagaacagctagtgaaagtggtccaatattaccgctttggatgtccctttgttgtcaccaaaatgttaccaagggggtccttgctcacagagctcccaagatggtggtgatccacttccaagatggtggtgggccacttccaagatggtggcaagcttcgtgttctctgacctggggttcttggcctcacgaattccaaggaatggaatcttgggccatgcagtgagtgttatagctctactaaaagctgtgggtcatggaagagaaccgtggaacccggcaactagtgttcaggttgattaggacaaacccaggcacttagccatgcaggaacaatggcaagattttagccctatcgggaatggcaatgggaccctcactggatcaggagcacagcagacaccctgccagatctggagggatggaagtctgcagcgggtttgcgatggtggcaaacagcagtggtggacggcgagtgaaagctcagctccagccataacagacacagaccagaagagtgcagttgcaagatttaatagagtgaaaacagagctcccatacaaagggaggggacccaaagggggttgccctttggttttcatttgctcttgcttatctaattctttaggattcatcattagattgtttatttgaaaattttctccatttttgatgtaagctcttagagctataaactttcctcttagtactggttttgcagtagcccctaggttttggtatgttatgtttccattatcatttgtttcaagaaatttctgaatttcctttttaatctcttcatggacccactggccattcatgagcatattgtttaatttccatttacttgtgtagtttccaaaattccttgtgttactgatggctagttttattacttggtggtcagagaagatgcttgatattatttcagtttctttgagtgttttaagacttgttctgtgacctaatatctggtcaattcttgataacaatccatgtgctgtggaaaagaatgtgtatctgtagcagttggatgaaatattctgcaaatatctattagacccatttggtctatagtgcagatgaagttcaatatctccttgttgattttctatctggatgacctgtccaatgctgaagtgggttgttgaagtctccagctattattgtattggggcctatctctctctagttctaattatgtttcttttacatatctgggtgctccatttttggttgcatatatacttaaaattgttccatcctcttgccaagctgactgctttatcatcaattgtcatattctttgtctcttcttacagttttcgtcttgaaatctattttgtctgctttaaatataataactcttcctcttttttttatttcctttggaatgtactgtctcattccattcctttactttcagtctatgtgtgtttttttaagtgaagttttttttttttttttttttaggcaacagattaataggtcttgtttcttcatctagtcagtttgtcttttgattggaaattttagtccatttacattcagtgttattattaagtaaggacttacttctgcctttttgttatttgtttactggttgttttgtgggcttctcttccttctttcatttcttcctgccttcctttattgataataattttctctgcatatatgtgtacagatttttcttaatgcctagcttaaggcacagttacacatttgtgcatctgtagcagtcctctctttaagttacacatacttccagcactataatttaaatttattatgatgtttggataccttcatcatgattcatgtacccctgaattgctagaacaaatgttccatttctctccttttccatcagttcttacttgtgtcttgtcagctaaagtccaggaagagattgaacgtgtcgttggcagaaaccggagcccctgcatgcaggacaggggccacatgccctacacagatgctgtggtgcacgaggtccagagatacatcgacctcatccccaccagcctgccccatgcagtgacctgtgacgttaaattcagaaactacctcattcccaaggtaagtttgtttctcctacactgcaactccatgttcttttattcctcaaattcacagtatgattcttaccctctaccatcactgggtgagagaagtgcattactcctatgtatggcagtttaattggactttctgttgattccagtttgggactataaagatttgtaacaggtcttagtgtctcacagtgtgtgtttttcagatttattctttcttcaagattgttctggctactcttaagtggttatatttccagacaaattttgaaggtgttaatttttcaatttcccaaaacattgggctagaatttctgtcagggtgacattaaatttataggtcagtttggaaagaactgacatcttgacaccttgagtctttctgtttgtgaatataattatgcttccaatttatttgcactttctttattttcccaggaatgttgtgattttgttgtcatggcttgcaagtctttggtttttcctagataattaatatttttgttgttgttataaacttacaaaatgccttttgatttctttgtacttggtatgttgaaacataattagtttttatcattctgatgaccttaatctatcaactttgctaaatttactaatcactattcataatttatctctagattcattggaatttctgtgaacagtacactgtatctgtgttaatattgttttatttcttactttccaattcttgtgggcttaatttctctttattgcattcattattgcattggctagaatttctaggagagtgttgaatagaattgctgatagtgggcatccttgtttctcatttctaatctgcaggaagcagtggaagttttacatttcaatattgaaaatgatgctagaagtagattttggtagaaattctttatcagattagggaagtttgccctcacatatatatagaaataaatataaatagaaataagtatgcacatagagatgaatttatattcttcatattgtttagggcttctgtgtttacattcacaaggatttagtttgtaattttctttctcagaattttcaagatttttgatatcaagattaggccagccttataaaactaagtgagaaatgtttcctaatgtgagtctgtttttactgcctccccgtctccacttttcttcttgtgatcacttagttgtatctttgaaatgcctaataacttttggttaaataccagatgttatgtgtaagaaagtgcagaatttcagaggatgtttatattcttcaaagaaagattcattcctctcccatcggcagtcataatgacataacacatgttgtcatgattcagaattgtacataatgtgaacccagtcgaaaattgactgtcagtgttagcttagctctctgaggttctcctacctctggaatcttgagaccaatttttgtcttggcagctttacaattgccttctatcacatggtttctgtattcatccagacactctagttgccatctcaaacctgctcttttccaatttaaaccaagacatattattagtaaaattaaaaataatataacctaaagttatattttcaaggggaaaaatcaatgagattggtaaggttgaaattactaatgtcactttttgaagaagacagaattgttaatttaccaagagattatggggcttaccctgaggtcactgatttagtacaagagttaagacttcaatgcactctgttttcacaaacacaggagataaccaggagaaggctttcgcttctcaaaattagggtctgagggtaatagtaatgaaacttatttcttctcctataactaattaatgagaaatatactgaagaatcaggatgagtcgccagtctcccaatccactgcatcagctttggtgacctgttgaaggggaatgctgcatctgatgagcttcttcattcacccacctgcagggcagctcatgctatgcctggtgtcttttgagccctgagaacccagagcgcaaggaaatcacccactgaatcccttcttcatggaacagcctatagaaaagtgcagcactgcgtggccaattctaccctctttacaaatcaggcaaatgtgttcttctgctacaggctggatccacttatctaggtggagataatagtctgagagaggagttggcaaactgttcctgtaatgggccagatagtaaatattttagactttttaggccatgatgtttctgttgcaatccttgacatctgctattgtagcatgaaagcagtcatagacaatgtacaaatgaatatcttccaatttttatagaaacaaatgtaaatttcccataaatttttgtttcaaaaatattatttatttgcatttgttcaatgtaaatacttttagctcacatactatacaaaaacaggtggcaggatggacttgtgcagagagtattgtttattgatgcccaatataagactttcctgtccagtagaattttctgcaaagatgctcgattgatttgtgtcctatttaaagaatatttgtcagcacaagattccaaagactgagttttaactttcccataatttttttgttttagctcttatatttacatcaatgacatgtttcaaattaatttttatttgtagtatggagtaataatggtcgtgcttcaatgtctataaatttctatttattcaagtaacatttgttgaaataaatctgctttggtatcttaaaaacattttaatatagtacttatttataaatattcaagggaatattttttaaaacaaaattgtagactatttatatgaaaacttagtgggtagaatttttcatcacctttgtattataaaatttttaagaataaataacattacacacatatatctatatgtacatatggcagtgtgtatatatatctactttgatatctgtctatccatctatctagacctcaatactgcagtatatgtagcccaataacaatggttttctcctatataataataatagcattcatagtatggagttattgatacaataatattatttactgtacagcttatatttaaaatttcccaattcttaaggaacattttaattacttttttctttcaattcactctccagtcaagaaacaggcacataattcgggtatgttgtcatttttatctcctgtaatcaagaacagttcatttcctctgtttcctttcagtatgttgatctctgtgaagagttgaggcctttagtcatttaaattttcttcgggcttgttttgtataattgttttctagatattatattccagttatgactttggcaagaaaactacatagtactttgactattccactgaatcacagtggtgaggcagaggcacataatgttacatatgctattactggttatgctaagatcctgacctaataagttggaatctgccagatctctccattgaaggagttctgcttttatgtgtaaatgatgaaaatctatggcatgacactttaagacagaacaccctgtttccaaagtcacacatccaatagttttatctttcattgatgatccttgcctggcctgatgatcttgacctgaatggttacaaaagatgatttttttctaatttcattattccttctgtattttttaaactattagaatctatttatttatttatttattttattatttttatactttaagttttagggtacatgtgcacaatgtgcaggttagttacatatgtatacatgtgccatgctggtgtgctgcacccattaactcgtcatttagcattaggtatatctcctaatgctatctttctgtatttttaagctatgattaatctgtaatgaatatctctcccgtatctttaaatgataacaaacaaactacatggcaatgacaaacattcaatagttttatacttgtgactatacttgttaccattctagaagacgtcgtttgaagctcaatcatatgtttattcacaaatgccctgtgaatagacactctggccatttcccatgtcaacagagacttcaactttattttatttatttatttatttatttttattattatactgtaagttttagggtacatgtgcacaacgtgcaggttagttacaaatgtatacatgtgccatgtcggtgtgctgcacccattaacttgtcatttagcattaggtatatctcctaatgctaaccctcctccctccctccaccccaaaacagtccctggtgtgtgatgttccccttcctgtgtccatgtgttctcattgttcaattcccacctatgagtgagaatatgcggtgtttggttttttgtccttgtgatagtttgctgagaatgatggtttccagcttcatccatgtccctacaaaggacatgaactcatcattttttatggctgtgtagtattccatggtgtatatgtgccatattttcttaatccagtctatcattgttggatatttgggttgattccaagtcgttgctattgtgagtagtgctgcaataaatatacgtgtgcatgtgtctttatagtagcatgatttataatcctttgggtatatacccagtaatgggatggctgggtcaagcggtatttctagttctagacccctgaggaatcaccacactgacttccacaatggttgaactagtttacagtcccaccaacagtgtaaaactgttcctatttctccacatcctctcctgcacctgttgtttcctgactttttaatgatcgccattctaactggtgtgagatggtatctcattgtggttgtgatttgcatttttgtgatggccagtgatgatgagcattttttcaagtgcttttggctgcataaatgtcttcttttcagaagtgtctgttcatatccttcacccactttttgatgcggttgtttgtttttttcttgtaaatttgttggagttcattgtagattctggatattagcccttcgtcagatgagtagattgcaaaaattttctcccattctgtaggttgcctattcactctgatggtggtttcttttgctgtgcagaagctctttagttttattagatcccatttgtcaattttggcttttgttgccattgcttttggtgttttagacatgaagtccttgcccatgcctatgtcctgagtggtattgcctaggttttcttctaggatttttatggttttaggtctaacatttaagtctttgatccatcttgaattaatttttgtataaggtgtaaagaagggatccagtttcagatttctacatacggctagtcagttttcccagcaccatttattaaatagggaatcctttccccatttcttgtttttgtcaagtttgtcaaagatcagatcattgtagatgtgtggtattatttctgttggctctgttctgttccattggtctacatctctgttttggtaccagtaccatgctgttttggttactgtagccttgtagtatagtttgaagtcaggtagtgtgatgcctccagctttgttcttttggcttaggattgacttggcaatgcaggctcttttttggttccatatgaactttaaagtagtttttccaattctgtgaagaaagtcattggtagcttgatggggatggcattgaatctataaattaccttgggcagtatggccattttcacaatattgattcttcctacctatgagcatggaatgttcttccatttgtttgtatcctcttttatttcattgagcagtggtttgtagttctccttaaagagatccttcacgtcccttgtaagttggattcctaggtattttattctctttgaagcaattgtgaatggaagttcactcatgatttggctctctgtttgtctgttattggtgtataagaatgcttgtgatttttgtccattgattttgtatcctgagactttgctgaagttgtttatcagcttaaggagattttgggctgagacgatggggttgtctagatgtacaatcatgtcatctgcaaacagggacaattagacttcatcttttcctaattgaatgccctttattcccttctcctgcctgatagccctgtccagaacttccaacactatgttgaataggagtggtgagagagaacatccctgtcttgtgcctttaagtcatagtctacacataagatttgtgaaaactgaagtgatgaaatagagcagcaggagtggacaggcactaaagcccaagcttgatgaaaaggacagattcagaaggttgcacccaagtacgcaagtactcagtacttcaaatgtggttgtgggcattttatttatttatttatttatttttttcatcagcagattttattaagaagaagaaacaggaaattcaaaagcaagttcattttaaattagctggtcagaagagtacaaagagaaaaaaaaagaaaagaatcaagaaatcctataggactttgggattttttttaaattttattatcattatactttaagttttagggtacatgtgcacaatgtgcaggtttgttacatatgtatacatgtgccatattggtgtgctgcacccattaactcatcatttagcattaggtatatctcctaatgctatccctcccccctccccccaccccacaacagtccccgaagtgtgatgttccccttcctgtgtccatgtgttctcattgttcaattcctgattgtgggcattttagcaagattattgtcactggccttaagctcatgcctcttattacttcgtctatctgtctggaaatggtactgctcttctttggaatggtgtttcatcatctgtacatcaaaagatttaactgcatgattaccactgtttcttaaaccttcgtgacttctttacagctcagttcacctatgtctcttgtttctagggcacaaccatattaacttccctcacttctgtgctacatgacaacaaagaatttcccaacccagagatgtttgaccctcgtcactttctggatgaaggtggaaattttaagaaaagtaactacttcatgcctttctcagcaggtaatataaatttatttccctttgtgtttcagggtacaagataacttttttgatcagttggaacttacatgtgccttctctgcagtggtacagttactctttgtacatgatcaagagcactgttctgaatgcctgtgttttctccgctggtgatacatcctcattattcggccagattagtgggttttggagaattaatccaattcttccaaattgagaaagctgaagtataggttggttgaattctgcctctagatacaccactgaggtactcaagaactcctcctggaagataaaactaattacattttcctcactagccatgaggaagttatctcactccagaacttcactgagtgtcttccacatggtgtccctcaccccctaggctgggcttgtaggataaaattatcctcaaacacagaatagggtcttaagaggctcacttctgtgtttggaaagcagagtaaacagatcattgtagttcaataggactgaggctgtgatatagaaaagaacaggctgttgtgggttgggaggtagatggaaaagctgtctgcttcttgttatcttataacccaaaatgagacataagtaactaatagcagtaaagacatttaagctacatcaaaggagtcagagaggatgaaaagaagagaaggcagggctattaaaggagataatgagccacaggagcaggatattggctctaaataaaggatattaaaacctttgccaaataaccatggatgggatcagggggacattaagaatgtagcaggatactctgcagtgatgcagagcaccatgctctttccctagtcatggcaatgttttttggatgtttgatctccacacgtgaaatgtgtgtgctgagcatctggtgatagaatctccttcctttttctgtgacctttgatgtctgctttatatgtggcactgtagataccaagataacaaggaaagaaaccttccttcaagcattcacatttagcacatgtatcagtccattctttcattgctataaagaaccacctgagactgggtaatttatgaagaaaagaggttatttgactcacagttccacaggctgtacaggaagaatggctgggaggactcaggaaacttgcagtcatggtagaaggcaaagaggaagcaagcatatattttcatggaagagcaggagagagagagcaaagaggaaaggctacacacttttaaacaaccagatctcatgagaactcactcactatcatgagaacagcaagtgagaaatcatcccctatgatgcaatcaccttctaccaggtatctcccccaacactgggaattagaatttgacatgagatttgggtaaggacacagagacaaagcataccagcacacaaataaataaataaataaataaataaataaataaataaataaataaataagaaataagaaattatgattctaggtgacacatgctgtctgtttcttctgccatatcaaaatacccaagactaggcaactgataaataacagaaatttatttctcacagttctgaaggctgtgaattccaagattgaggtgtcagcaagttcactgtctggtgagggcctgttccttattgataataccccctctgtatcctcatgtggcagaagcacaaaaaaagcaaaaggggagaaatggctcccttgcatctcttggtgttattattttagcaaggacagagccctcctgacttattcactgcctacaaggcctcatcactttagtaatgttgcactgggtattatgtttcaacatatgaaatggggggaggaatattcagaccatagcacatttttcaatggaagcatgaacatgatgttgaggaatcccagggaaacgaacattttcttgctcagtgagatgagaaagagagtaaaaaaggagataaaatttgacctatgtcctgactgtggtaatagaaaagttcatcttgttcaaaaggagaagcatgatataaaacttgaaacctagtgtgttggggactgatgatgagtggctatgcctagagttgagagtaggggaggtgaagagtgtaaaatgtgatacggatcatcagactggaaacagaatgtgagggtccaggtcaagctatttggatcttatcccataggacagacagggaagccatttaaagttttaaagtgagggggtaacatgtttagacatgtgattctgaaaatacttagcgggaaaaaaatctttggctgcatactgagccagaaatacaaagggaaatgccgaatgtgagcctcctcccctaagcccttctcagttcaacccactggacaggtaatgtatgtttctcaagaaagattttaatgaattgcttggcatgtagctgacagtcaataaacatttgttgaatacatggtgcttgataagatctgaagataggtgaagagtaagcatgtccattcattgtttagttgcctatccatccattcatccattaatccttccacccatccatcctttcattcatgcattcacccaaccacccatctatctactcatccctcctatgattcaccgaacagttcttgcatattctgtctgtgccagttatagagacagtgtttgtcactctcacagttacacatgaggagtaacttctccctatgtttgttattttcaggaaaacggatttgtgtgggagagggcctggcccgcatggagctgtttttattcctgaccttcattttacagaactttaacctgaaatctctgattgacccaaaggaccttgacacaactcctgttgtcaatggatttgcttctgtcccgcccttctatcagctgtgcttcattcctgtctga

SEQ ID NO: 134 - DNA, 4379 bp, Homo sapiens
gctgagagtgtcctgcctggtcctctgtgcctggtggggtgggggtgccaggtgtgtccagaggagcccatttggtagtgaggcaggtatggggctagaagcactggtgcccctggccgtgatagtggccatcttcctgctcctggtggacctgatgcaccggcgccaacgctgggctgcacgctacccaccaggccccctgccactgcccgggctgggcaacctgctgcatgtggacttccagaacacaccatactgcttcgaccaggtgagggaggaggtcctggagggcggcagaggtcctgaggatgccccaccaccagcaaacatgggtggtgggtgaaaccacaggctggaccagaagccaggctgagaaggggaagcaggtttgggggacttcctggagaagggcatttatacatggcatgaaggactggattttccaaaggccaaggaagagtagggcaagggcctggaggtggagctggacttggcagtgggcatgcaagcccattgggcaacatatgttatggagtacaaagtcccttctgctgacaccagaaggaaaggccttgggaatggaagatgagttagtcctgagtgccgtttaaatcacgaaatcgaggatgaagggggtgcagtgacccggttcaaaccttttgcactgtgggtcctcgggcctcactgctcaccggcatggaccatcatctgggaatgggatgctaactggggcctctcggcaattttggtgactcttgcaaggtcatacctgggtgacgcatccaaactgagttcctccatcacagaaggtgtgacccccacccccgccccaggatcaggaggctgggtctcctccttccacctgctcactcctggtagccccgggggtcgtccaaggttcaaataggactaggacctgtagtctggggggatcctggcttgacaagaggccctgaccctccctctgcagttgcggcgccgcttcggggacgtgttcagcctgcagctggcctggacgccggtggtcgtgctcaatgggctggcggccgtgcgcgaggcgctggtgacccacggcgaggacaccgccgaccgcccgcctgtgcccatcacccagatcctgggtttcgggccgcgttcccaaggcaagcagcggtggggacagagacagatttccgtgggacccgggtgggtgatgaccgtagtccgagctgggcagagagggcgcggggtcgtggacatgaaacaggccagcgagtggggacagcgggccaagaaaccacctgcactagggaggtgtgagcatggggacgagggcggggcttgtgacgagtgggcggggccactgccgagacctggcaggagcccaatgggtgaggctggcgcatttcccagctggaatccggtgtcgaagtggggggcggggaccgcacctgtgctgtaagctcagtgtgggtggcgcggggcccgcggggtcttccctgagtgcaaaggcggtcagggtgggcagagacgaggtggggcaaagccctgccccagccaagggagcaaggtggatgcacaaagagtgggccctgtgaccagctggacagagccagggactgcgggagaccagggggagcatagggttggagtgggtggtggatggtggggctaatgccttcatggccacgcgcacgtgcccgtcccacccccaggggtgttcctggcgcgctatgggcccgcgtggcgcgagcagaggcgcttctccgtctccaccttgcgcaacttgggcctgggcaagaagtcgctggagcagtgggtgaccgaggaggccgcctgcctttgtgccgccttcgccaaccactccggtgggtgatgggcagaagggcacaaagcgggaactgggaaggcgggggacggggaaggcgaccccttacccgcatctcccacccccaggacgcccctttcgccccaacggtctcttggacaaagccgtgagcaacgtgatcgcctccctcacctgcgggcgccgcttcgagtacgacgaccctcgcttcctcaggctgctggacctagctcaggagggactgaaggaggagtcgggctttctgcgcgaggtgcggagcgagagaccgaggagtctctgcagggcgagctcccgagaggtgccggggctggactggggcctcggaagagcaggatttgcatagatgggtttgggaaaggacattccaggagaccccactgtaagaagggcctggaggaggaggggacatctcagacatggtcgtgggagaggtgtgcccgggtcagggggcaccaggagaggccaaggactctgtacctcctatccacgtcagagatttcgattttaggtttctcctctgggcaaggagagagggtggaggctggcacttggggagggacttggtgaggtcagtggtaaggacaggcaggccctgggtctacctggagatggctggggcctgagacttgtccaggtgaacgcagagcacaggagggattgagaccccgttctgtctggtgtaggtgctgaatgctgtccccgtcctcctgcatatcccagcgctggctggcaaggtcctacgcttccaaaaggctttcctgacccagctggatgagctgctaactgagcacaggatgacctgggacccagcccagcccccccgagacctgactgaggccttcctggcagagatggagaaggtgagagtggctgccacggtggggggcaagggtggtgggttgagcgtcccaggaggaatgaggggaggctgggcaaaaggttggaccagtgcatcacccggcgagccgcatctgggctgacaggtgcagaattggaggtcatttgggggctaccccgttctgtcccgagtatgctctcggccctgctcaggccaaggggaaccctgagagcagcttcaatgatgagaacctgtgcatagtggtggctgacctgttctctgccgggatggtgaccacctcgaccacgctggcctggggcctcctgctcatgatcctacatccggatgtgcagcgtgagcccatctgggaaacagtgcaggggccgagggaggaagggtacaggcgggggcccatgaactttgctgggacacccggggctccaagcacaggcttgaccaggatcctgtaagcctgacctcctccaacataggaggcaagaaggagtgtcagggccggaccccctgggtgctgacccattgtggggacgcatgtctgtccaggccgtgtccaacaggagatcgacgacgtgatagggcaggtgcggcgaccagagatgggtgaccaggctcacatgccctacaccactgccgtgattcatgaggtgcagcgctttggggacatcgtccccctgggtgtgacccatatgacatcccgtgacatcgaagtacagggcttccgcatccctaaggtaggcctggcgccctcctcaccccagctcagcaccagcccctggtgatagccccagcatggctactgccaggtgggcccactctaggaaccctggccacctagtcctcaatgccaccacactgactgtccccacttgggtggggggtccagagtataggcagggctggcctgtccatccagagcccccgtctagtggggagacaaaccaggacctgccagaatgttggaggacccaacacctgcagggagagggggcagtgtgggtgcctctgagaggtgtgactgcgccctgctgtggggtcggagagggtactgtggagcttctcgggcgcaggactagttgacagagtccagctgtgtgccaggcagtgtgtgtcccccgtgtgtttggtggcaggggtcccagcatcctagagtccagtccccactctcaccctgcatcttctgcccagggaacgacactcatcaccaacctgtcatcggtgctgaaggatgaggccgtctgggagaagcccttccgcttccaccccgaacacttcctggatgcccagggccactttgtgaagccggaggccttcctgcctttctcagcaggtgcctgtggggagcccggctccctgtccccttccgtggagtcttgcaggggtatcacccaggagccaggctcactgacgcccctcccctccccacaggccgccgtgcatgcctcggggagcccctggcccgcatggagctcttcctcttcttcacctccctgctgcagcacttcagcttctcggtgcccactggacagccccggcccagccaccatggtgtctttgctttcctggtgaccccatccccctatgagctttgtgctgtgccccgctagaatggggtacctagtccccagcctgctccctagccagaggctctaatgtacaataaagcaatgtggtagttcc

SEQ ID NO: 135 - DNA, 11756 bp, Homo sapiens
gtctcccgggctggcagcagggccccagcggcaccatgtctgccctcggagtcaccgtggccctgctggtgtgggcggccttcctcctgctggtgtccatgtggaggcaggtgcacagcagctggaatctgcccccaggccctttcccgcttcccatcatcgggaacctcttccagttggaattgaagaatattcccaagtccttcacccgggtaagagaaatagtgttgattttagggagaataactcagcaattggatctggtatgtgtgtattcaactcatttgcagacaaattgtggttgttcaataccagcctgttgtgaattacctgaattgatagcatcctggagcgacactcaaaatgtgtcgcctgtggtgcagctggagcccggagcctgcgtgccaggccccggaggcccccgccggtgccttgtcctggggctgatgatggggaggccggcgaggccgggctgctgcgacgccaggataaccgggctggcggccagatgcgcactcgctgggcgtccgcctgtgtttgccaaagcacgagttgaaacgtgaagtgttgggccagcccgtgtggcaccaatacctgccgcctacgactgttgtgaacactgaatgggccaacaaacctaaacgttaaatgaactgataacgccgtcagcacggagcaggcgctgggtgtttgcgctcttgcgcgtgcgctctgtggggcgcaggctgacggcgggcgggggtcgcctgctccagctcgggctcccgcgccagaaccgggtccagaaccttgattccggaagcgggcaacggggtggttggtgggcgcgcctgagggaagggacgtgaggagccggagtccgcggagttgccgcggagttgtccgcggagtccaggcgggtggggagcagagcagctggaaccccccgagcgccctgcagacgcagcagcctcttgaggggagggtctcccccacctcgggctggacaaagacagcttttccccacgtccctctgggttctctagagcaacagcaatacccgcccggcaggggtgtggcttagagccccgcacctcctcgccgcgcggcgggcctgacttctagccacgggtctccgcagttggcccagcgcttcgggccggtgttcacgctgtacgtgggctcgcagcgcatggtggtgatgcacggctacaaggcggtgaaggaagcgctgctggactacaaggacgagttctcgggcagaggcgacctccccgcgttccatgcgcacagggacaggggtgagtccgcgtccctggcacggagcggggggtgcataacacgccccgggacagttacgggcgctagccacgtcggcgatggccaaataataaactaacagtaatattatagtaacagcatccgaaggatgagatcaggattagggcgatggcccccgcgcgttgcctgcggagcgaggcgcactgagtcgcccaggaatccggcctctcggcgactgtgcgggagagtttatggggatgggcggggctgcttctgagcaggagtcgccgcccccacccccaccgttccgcctctgggcccgcaggctcctcccgggagcgctttcccctcctgttcaaccgccggggtacaggtggcttcgtccaccgaggtcccctcacccacgctgaggcgtcggaagctgcggacactgctcgcttcagggctttgctcagctgcagctggtgacctccagagagggagtctctgatgtcccgctggggtggatgtcctgagaccgggaagggggaagagacccactgaaatcctatctcccagcctcacctctgctgtctcctccacgcttcctgtctccagagccccgagttcagcataagcagaaagcggcctgttccctctctagggagaggagggttgcggtctggaggtctggctcgtctttatctgcgcattctcccagcctcctggcttcagacctcagcgaggcggcggctgccggccggctctcctcttcctgcctgcagacctggcctgctgcttctttctccttcctccctccctgcctgccctgcggtttcaaagtagattagaaataacagtgtcccacatggaagcctctacttcttcctgggtcaactttgatgacgaggctccagaaaacctttgcaatgctgtgtggaatttttaaatcggtgagctcgtgctcttgccctatttatttgtccagcgtacatttctgaacattgtgaacgtcgaatgggccaacaaatctaaaaattaaatgagctgataaagaacgccgtcagcacagagcagacgctgggtgttcgcgctcttgagcgtgcgctctgcggggcgcgggctggtggcgggcgggggtcgccggctccagctcaggttcccgcgccaggaccgcgtccagaaccttgtctccggaagcgggcaacggggtggttgtatcacaattagtggcatttggttttccttcttctgcattgtgggttttacttctctggggttgccaaaaacaaaattaaccatctcagtccttgtcgttaacgcaggagaagcattactggaggaggctctggggttctgtggttgaggagctcagttctggttccggggagcccttatctgccacccacgggtccaaggcacagtcggaggcagcagggaggggagcggaattcacatcaacacagatggggctcaaggggactttgctgcctctgcctggagggtctaaagtttcattttcatatgacccgcagggcgcagactggcggaaaattagcagagccctgggcatgggctgcacctggcccttaagggacaatgatggaaatattccttattagcacaatactgagcacaggctgtgtgataatgtgtcaagggaactgcagacatcctttcagaaaaagttcataaaacggagaaagtttggttcccaacctagatttttaacctgttgaactctgtctaaatgggtcatctcgggatgtcctccactcaacatgaccacgtctgcccctctgtcccacctgtctcctcagtccttcctccccacctttcaggatgaaatgaaaccctcagtccagctgcacccctgccccacccacctcatctcatgtgccctcccgcccctctcaggccggacagccttgcttctggaacacacgagcacagcttcaccaggcactttctgagcaccctgcaggcgcctcccaggagtggtcagtggtcaatcagctaatgaagctgcataggacatgacccttgtttaccgcagaatgcccagagctggcaggatgtcttatatgcaggaagtacccaaaatgtatttattgaggaagtgatgatggataagaggaagacggagagcgagggagagaggggctaggggcccctgcggtgtaaagggggtgtggctgggagtgtgcaggggaacagggatcatttcaaggttcctatctgggagaaaataaaaaggtttacagttagttgagataagcgtgggaatatgcgaacatttttaaagaataaaaagtttagctttaaatttgttgattccaaatgtgttcatactctcgggaggatccatcaagcaactcttgggaggagagacagggcagggccaggccttgacagctcagaagggtgcagtagggacagttcttggttttcccagctctgatgctttgcacagtcacttgtgtgacctgcaagattttagtgaagaaacttgctgtggagtcggaaagctgcaagttgaggtgtgtgtggtgtgagggttaaaaatctgtgagaacagaatgaatggcttttcaagaatgttgtcgatagataggaaagaggtgggaggtgttcttggagtggccatatgtggttttatgtagcatggggaagactcagcagaaaggaaaaagaaagaaggtaaattgacagcatgaagtagagcacccaggagaggctacatgtgatgaagaaaccacagtgcagactgtgaggaccccagaaaggctcctccccaaaacctgaccagtggccggtgctggcagctcccaggctgggacacccctctgtctctctgtccctctgccccctctgtcacttctttatacacctgtaaatcctgccctgctctccaaggccctctgtagcccatttctccccaaaatgggtatttagaataaccttctgctggcccctctgccttaggaatcatttttaataatggacctacctggaaggacatccggcggttttccctgaccaccctccggaactatgggatggggaaacagggcaatgagagccggatccagagggaggcccacttcctgctggaagcactcaggaagacccaaggtgcgtatctgctgcctagcagggcccagtcctcttgcagaccagcggtgtggggagccctggctgggactcctagactgcatctgaaccacagggacctacggacaaggagagggtctcgtgagtccccagatactgcattttacaactctaggttccagctacacagttcagggagcaagggtggccattaaacacgtgacttgtatcctaaatactgttgaaaagcaaaggaaactcaaacaggttcagacattcactatctttcgtaaactggcagttttcagggcaccttctcacaggccttggtgaacctcagtgggtgactgagcaggtggaggagtctcctcacccccatcttctggttgccctgactgcctgttttgtaggccagcctttcgaccccaccttcctcatcggctgcgcgccctgcaacgtcatagccgacatcctcttccgcaagcattttgactacaatgatgagaagtttctaaggctgatgtatttgtttaatgagaacttccacctactcagcactccctggctccaggtgaagccactttcctctttcatcagtcatcaactgtagagtttacgttagaaaaagaaggaaaatttgggttatatgtgatagacaggactgcaaaagccaaacaacatagcttcgaggggtgtttgattagacagcccaaatattcctcccagagacatctctggggccccacgcaccccctttcctaacgtcaggatgtgtatcgacctgtgtgtgcacatttgccatgcagagtttgcactgctgaggagaatggtgcccaagaaggacactgttgacccaaaatattccaaataaacaatgattacagccacaaattcaggtttggagaaagttgttggtccaacacacacaattatgttgcatccagaaaaaagtagtaaaatatttttttccctctctagctttacaataattttcccagctttctacactacttgcctggaagccacagaaaagtcataaaaaatgtggctgaagtaaaagagtatgtgtctgaaagggtgaaggagcaccatcaatctctggaccccaactgtccccgggacctcaccgactgcctgctcgtggaaatggagaaggtaggctcggccctcccatgatgtgggctctccggggtgggcagagaatgcacaatttcagatttacagagtgagctgcacttgctggtgtccagacctcccaccgcagcatgctctgagtttcatacacacactcttggcttcagcatgaccactggacgcaagtcagcctgcctggctgccaagctggcctggggctttggggtcacatgggcgggacgcttagctctctccaggccctgctgctcaaccctttctagtctgcagactttgagaattgcattttgtctgaggagaagccctcagccttccttgtgggcatgcactccccaactgtgcgcagctgcaggacttccaggcctccccagcttcatccacctgcaggtgctcaggatcctgatcccctgcccccttcccaccttggtgaaacttcttgtatccttgtcttgtcctttcctatggcttgtggctcaagaacaaatgtggagcccacactgatttcccaggactgtctgagcatcttctccaccagtttggcccctcgtggcagcagacactagccctgtagcaggaggggttagcaggagccgtttagctcctgcctgagctatgaccaaggtcagggggatctcacctctcccaggatggccctcatgctgtggagggagacagagccctggcctgccctcagcagatttctgggagcctcagtttccctggctgtgaggtggagatgactctgtctgtcacagctccaagtcacagttccactgggagagcctcttggacactgtctcctgtgtccctgtggagctgggaggtggctggttctgtgctgaaaggagacaagcagccccttctcctccggtctgtctccggtatcacaggaaaagcacagtgcagagcgcttgtacacaatggacggtatcaccgtgactgtggccgacctgttctttgcggggacagagaccaccagcacaactctgagatatgggctcctgattctcatgaaataccctgagattgaaggtaggcaagtgactgaagggacaccgtgcgtgcggctgcatctccctggatggccagccttgcacattttaggctgcagctttctgtctgaagctgcttgttaaccctcatggtgatgtggtgagatggctagatgcactgctgtgaggggaggtgttatggtctgtgctgaacacctggtactcttgcacactggttggtccataccccactaagacacccctggttgcagaaaagaacatcccaacaccagagtggagagaggtggcagggtctgcattctgctccataaataacctctttatgacagagaagataatgtcccagttccccccaagtaagacctggtcttctaggcagagcaggtggggaggttggagctggaggggagggtccttgctggggcgtcttcctcaaatgcggacgtgaggagggaagtccaggaagaagcagctacagctgccctggacccttgttccttccacagggctcctcccagcggcacctggggcagctgggactctgtgcctggaggaggtgtgaaaggtctgggtctaggtgggcagagggtcatgccctgagaaacacccatctgggccaagtagaggtgatgtgagggcacccgcatgcaaacaggccagtcagggttgggtccaagtaaaggggaggaaagggagctgcagcctggctggagagtgccggggggcccagagcccctgcctctcgctgggctggaaacagggctgggcagcctctgcccgaggcagttcacagcctgagtggtgtgtgccgccctcctcctgaagctgctgctaatggtcacttgtggtcttaaggctcgtcagttcctgaaagcaggtattataggctatgaagttatttcccccaagaaagtcgacatgtgatggatccagggtcagaccctgggcttttcttgttctttccttcttcttcttctttttatttatttatttttttttttgaggggacagggtctcactctgttgcccaggctggagtgcggtgatgcaatcatggctcattgtagcttctacctattgggctcaagcgatcctcccacctcagcctcccaagtaactgggccacaggtgcacaccaccacacccagctgattaaaaatttaaaaaaattattttggctgggcacagtggctcatacctgtaatcctggcactttgggaggctgaggcaggcgatcacgaggtcaggagttcgagaccttcctggccaacatgatgaaaccctgtctctcctaaaatacaaaaaagtagccgggtgtggtggcacgcgcctatagtcacagctactcaggaggctgaggcaggagaatcgcttcaacctcagaggcacagggtgcagtgatccgagattgcaccccactgcactctagcctgacaacagagcaagaatcagtctaaaaaaaaaattgtagagacaagttgttactatgttttgtaggctggtcttgaactcctgggctcaagtcatcctcctgccttggcctcccaaagtgctggggttacaggtgtggccaccgtgccccatccctggcctttgctttttcaatcacatggaaatgtgaagggtgaaggagccaaaagtttagggaaggaatcattgtatggatctgcagtgattataagagaactttcgactactctgcactaggggaaccatggaatcaaaaaatgttttaaattattatttatgaggaggttccaatatagacaaaaggaaaataaatatgattgacatgtatatatccattgccaaattgaacgtttattaacattttgcgatacttccatcagagctcttaaaaagaaaatgtgttacagagccagccaaagtctacctcctcacatctccccacctctctcaccagaaatggcttcagaattgctgtgtggctttgcacttttaacagttgttaattatcagcacagtattcatattattgctgtatgtgtttaatattttacctgggtactgtacataacattttgcagcttggttttttcactcaacatatgatgatgttccatgggaactccaaacacggggaggctaggcgacttgctcaaggcagctgttacctctgtcagaaagacagaggctttcagattcaagaagtagaccctgcatgtctgattctgttctgtaaacccccttcatactcagaagcatgcaataaacaagcctggggtaattatcaatgcaaaggttaccctcccagaagaaatttccaaaacactttcattattctctgctcttgacatgaagagaactgaataagccatcatcaactgagataatggatgccaaaacatccagtaaataacctcatagagcttagctctcactaagtttttggagcattttccagtaattcaaaggacctggggaaccttaagcactgcttaggatgctccataaacatcttctgcgtgggtaggggagtggatggatggctggatgggtgggtggatggacggacggatggatggatggatggatggatggatggttggatggatgggtgggtggatggatggatgggtcaatggatgtgtggatggatggaagggtgggtggatgggtggatggttggatgtatagatgggtggatgggtggatgcttggatggatgcgtgggtaggtggatggagggatggctggatggatgggtgggtgggtgggtgggtggatggatgggtggatgggtggttgggtggatggatggataggagggtggataaatgggtggatggatggatgggagggtggataaatgggtggatgggtggatggttggatggatgggtgggtgggtggatggatgggtggttggatggatgggtgggtgggtggatgggagggtggatggatgggtggttggatggatgggtgggtgggtggatgggagggtggatggctggctggctgggtgggtgggtggatggatgcatgggtggatggatggaggatggatggatggatggaggggtgtatagatggaggggtggatggatgtgtaggtgggcagatggataaaagcgtgattgaatagatgggtggatgatgggtggatgcccaactggccaggaaccaatccctgaaatttgtcccattcatatcttggcagagaagctccatgaagaaattgacagggtgattgggccaagccgaatccctgccatcaaggataggcaagagatgccctacatggatgctgtggtgcatgagattcagcggttcatcaccctcgtgccctccaacctgccccatgaagcaacccgagacaccattttcagaggatacctcatccccaaggttaagcaatgagcctgcagcacacagcatgaacaccatcctatcagctaatcgccttcctgccagggagcaggatgggggccccaagacccttccctttggcaggggtcactgaggggaagggctggccccactcccaccctgtgggatactgcatctccaggagtgctcacattggcctggtgaccagagaggtggaggaaatctggaaaagagcctcagcagatagtgcctgggactgtagtgaattctaatgccaggaacaaactatcacaaccagccctggggttaatcctgtgagaagattagggctttcatcttcatttagacctgacccctgactgctttctatctaatccttcactaagcaactccttcaactggaaatatactatcctatatagcataatattcaaaactacattcttcactgggggtttccagatgaaagcccacattttgttaacatgactcactgagacagtctttgtttctcctagggcacagtcgtagtgccaactctggactctgttttgtatgacaaccaagaatttcctgatccagaaaagtttaagccagaacacttcctgaatgaaaatggaaagtttaagtacagtgactatttcaagccattttccacaggtgagaaagatcagaggcagtaccttcccttgaggagcagcccacactcctcatctcccctccacatgtgctctgccctcgtcccaggcacccactgacaccccaaacctcactgtgtgccctgtttctattgacaacatgacccaaatgtgctcttccctgttcagagaagttacataacatcttttagcagcaatcctgggaatgaagtgttgttgtaggtggattttttttttcccaaagactagacattttacatcattcattgctaaattttgtttctattttaacaagacttagtgaaaagctctcaaagccatattacccaattctccctaattttaaaccagagctactaaacaaaacctaacctttggttacctagaatcatcacaggaagcatcaaagccttcctgggatgtgactcagtgattttctttgaggcacttgtcctccttcccagggcctcatcttagggattgttgtgggaagatcatacaaccaactccatacttttcacacccagtgctggagccccagcttctaacagggcactatttccctcctgtaggcatcactgatgagcactgggggtgccttctttactgggcagacacggtcttcccaacttaacaccggtttttgcagttgagctctggataattgagattgtatgaagactggtccccgaattagtcagtgttgctggtatccttccactcaagtacattttgtgcttcttttaataggcagagaagggtgagtcctgccttgtgatggccgtttgcccacagcctcctcctccccgcttcccctagtctcactgttaacagtgtcgtgtctctgaaactccctcagtgtctcatcaataccattgttacttctaggaaaacgagtgtgtgctggagaaggcctggctcgcatggagttgtttcttttgttgtgtgccattttgcagcattttaatttgaagcctctcgttgacccaaaggatatcgacctcagccctatacatattgggtttggctgtatcccaccacgttacaaactctgtgtcattccccgctcatgagtgtgtggaggacaccctgaaccccccgctttcaaacaagttttcaaattgtttgaggtcaggatttctcaaactgattcctttctttgcatatgagtatttgaaaataaatattttcccagaatataaataaatcatcacatgattatttt

SEQ ID NO: 136 - DNA, 27205 bp, Homo sapiens
cactgctgtgcagggcaggaaagctccatgcacatagcccagcaaagagcaacacagagctgaaaggaagactcagaggagagagataagtaaggaaagtagtgatggctctcatcccagacttggccatggaaacctggcttctcctggctgtcagcctggtgctcctctatctgtgagtaactgtccaggctcctcttctctgtttccttggacttggggtgctaatcaggcctctctttcccttatctgttttgaagatcaaaaaagatgttcaggccgggcgtggtggcttacacctgtaatcccagcactttgggaggctaaggcaagtggactgcctgaggtcaggagttcaagaccagcctggctaacatggtgaaactctgtctctactaaaaatacaaaaattagctgggcatggtggtgcacgcctgtattcccagctacttgggaggctgaggcaggagaattgcttgaacccggcaggcggaggttgcagtgagctgagatcatgccagtgcacttcagcctgggtgacagagtgaggctgtctcaaaaaaaaaaaaaaaaaaaaaagatgttcaaggagcagtagcttaagtgttggatgctacaaacatatagaggttattgtagatcttatgcagctctataaaggaataaataagcatcttccccatccatctttagtggcaagaagggttttgggatagcattgattgaggatgatctacttgacaatagtttggacccaaggaggataaggaaggaaagtagtgacggatctcattccaaacttggctgtggaaacctggcttctccttactaaactagaatttggattttacattttcccctttatgttgcagtagaagaggatgaatcctctcactggtgggatcctgccatcctagagcaggtagagagaagagtcactccccactgtgggtagtggaggcttctcacatgtcacatttcacttctacctcaatttcactcttactaagatttgggaatcataatgacaggaaaatagaaaatataaacctcattttaattctttcacagaaaggttagaaattcagtgagttgtggcaacatattttccatcttctgaccttttaacactaattgatatggcttaaattcattctattttaaaccagatttttttggagatagtctatttccaacatgttccttctaggtgacaaatgagggctgttagttcagtatttgttacaataaatgtgtgtaaaataacctcacctttccagaatcatgtcaggaatatgaatctaatgcacaaatgtataactctatgacaagattgcatatatcttttaaaatataccttcccaacgttcattttaatacccctatttcaaacaaacctgcttagcaggttatgttaaacgctcagggcagaggagtaagcaagactgtgagccagtgatgacagcaaaagcatccaggtaggatcaaaatggagtaagaaaatattcctcatccctcagggtagaactccaaagagatattcatgggtcctggccccgtagtggaggtcactcaaaggacaaacatgtttgcatctcatctgcttgaagcctggacacagaggcaccatctgtgtcactctgtgtgtggtctgccatgttgtggggtggtcactacagactcaggcagctgggcagacaataccttagccttagatgatgctgatgcagcccaggagtcagaaactgtagtgcagacaatgccctccttaggccaacacaattaagtgcaatagatgactggcttttctgttagcctcttcattggaaccaaaagcagcattactctaccaaacagaggggagctggaaagaaactacacagtttgcccagcctagcctctgccttgacacggaaccatgtgagtctagacattcacctagatcattccttggggaccaatgctgctgacacattaactcaatagtttgtcctggcctgagaggtcatgtaacttgtagaaagtttagaagcagagattagtgtcatttatttgccatggctgtgacaacaaaggaaggaacaggagtgggaaaacccaaggccaccctggttttggtagatggtgcacacgcttccactaactgttctggggcaaagatccaaatgcactattgggcctggctatgctgcttctgctgggtcccccaaacatgagcctccacgccatttctcagttgtattttaccacatattatcacagtcaccggatttgtacagaatatttggaacctatactgtcttaagggctaccctttaaagaagagaaaacaaggttttaattcaactgtctggaacattttatgtttacttatgtggaatactacatcttttgttataaacaggagggaatgtggacattcgaaggcccctaccttttagctaaaagcccatatgaagcatatggatccatttatacacaccatgcttttcagctacattttcctaatttgcctctctggggccaaccttgtgggactagcagattcatggttgagttgaaggatggtgacctcttccatcagcttttcttcttcctccagtcttccaaccctcagtaacatcagactgggaaggtcttcagacatccagaaaccccagttcggggagttcatacatgacccatcaaagatgagttgcaagcaggcctgccttagggagcaccagccttaatgggttttcctacagagatagttgatgggcagatgcaataaactgactgctttgtgattgaccaccttgagaaaaattagcatgtctggctatgttagtcttttcttgcattgttataaagaaataccagagtctgggtatttataaagaaaagggatttaattgtctcatggttctgcaggctgtacagaaagcatagtgacttcttcctctagggaggtctcaggaaatttacaatcatggcagaaggtgaaggagaagcagacagatcttacatggctggagcagaagcaagagaggctggggagaaggtgccacacattcaaaccaccagatctcataaaaactcattgtcacgaggacaacacctaaggcgggatggtgtgaaacgatgagaaactgcccctaggatccaatcatctcctaccaggccccacctccagtattggggattgcatttcaacatgagattttggtaggggcacagattcagaccatatcactggcactgtgctaatcagatgaatatcaccagttggaaggctagattccacaagaggaggaatgacctggaaattggttctttagttgtgattcttctgcacactgtcattcagggaaatatgagtcaatcatccttcccaataggtcaaatcaaccagatcatctgatcacagagactgaggtgtagctgaaagctgctcacatttctatgaggtcaatggaagccttgagcacagttgtcaatctgtagaaataaggactctgtgactcctccaagacctctctgtgaatgacggtttaagaagaaccagatcctaaaacagggtcagagcttagagggaagggaaagcataaaagcctctgagcaaattctaaagacagggtcaccataggctctcagtgaccctctgtgactgagtggctgcagtgatgcaaaatctcatcatcactgcggaagacaaaaaaatgtcaccctttctacctaggatgagaatccccaaatttggggagaggccacttactaaatagacgtaaaggaacaaagtgacctggaagaattcctgcctgaacctctcaggatcattcacatttgagaacatttatcaaatattcattccaggactgggaccatgaagacttcagctgctttgagctaatcattgtaactttttggtgtctcatggtggaggcaggaaaggacctgatgaacaaatataatcattgccgtcagagttactgttattatttcttgccttaatgttacctcgttctcttgagcattccagttcctcagtcaatgactcatcaacccctatatctataaagtcacaatcgctgtgacttgatttctgtttcactttgtagatatggaacccattcacatggactttttaagaagcttggaattccagggcccacacctctgccttttttgggaaatattttgtcctaccataaggtgagtgtttttgagctcactcttttgcttcttatgattgccaagagcagcttagttccatcagtaaaaatgcttctcctcagggggaaggtctgaagttttacactttcagaaacagtgtgtaggcatcacccagaacatggcaatgtttacccaagggctctcttgctaactctcaggaacctcaggtttgcctcagttgaacagcccaaatctcaggtagatcagcaacctgatgctcagaacttgatgtgcaaactttgtgagcgccataaagaaggttttctttttgctctatgcaggttcccaggaaggtacagtcatacttagttagtattaaaagtaggaaaaggaccccctgattgtgacttgttatctgtgtacatgagagtcaaactttcctctctgtagcaagagctcttgagtagccttttttcccttccttctggacagctttgaaactcaatttattagggagcccaggtatttacctttgggtcatttgcacctgcttcaatcctctccgaaaaatgctaaattccctgagggtatctccatggctctaccccagctcttactccccatgacatcttttgcagctttgagagacagaacaaaggggttctgctttatttcttttccttcaaaggctgcaccttatgggtgagtctgatcacagactggatataactgagatgagacagtggtggtcaatcaaactcagatatttaagcacaaaatgagtttgtggggttttttttttacacaaaggcggaatcacatgcaaaatcactagaaaggggatgatttgatgaaattattaaatatttaattttgctgaatagaatataatatgtgccacgtggaccgtgaactttggccgagcctttgtgcctaacctagtctgatgctctgcccagggtctgggccctggatggaaaattaggagcccatgtccacatggccagccgcagcagtcagctctttggcttacatcatctttcccacatacctgaggcttgtttctcagattctaattctctcaggtgagggctttgttgtctaattactatccaggaatttcatattttttccctgtgcaaaagcaataatttccccgccaccttttccaggtcaactctttagtagatgtacccccaagatgcacattcctgggacctttgtttgcacagttaaaatgtcacccctgaaatgtcgatacaggaaggtttgtttttaagtttcagtgaaaactctgagcaagtgttgtaatttgctgtgtccgatgtgtagaggggacattttctcagaacttccatgttaagctggaaaactggaaagtgagttcactttgtcattctgtcactcgttcattttctcactcaacaacatgcctcatacttacctaaatctgctagactaaaggagttccctggtgtctgtaactttccaattctgctagaactctagagcgagctcatgaaataaatgaaaaggatgacaaagagataaaacactgtgcattctcttctgatgctaattcactttcccttggcctcagtttccccatgtgcccctggaggtgatcattcagggattcatgagattttcaagacaacacatgaaaaagcaaaaagacatcagaaagacaaagaggtacttagtatttatacacaaggataagtcattcagtatccacaacacttggagagaattcaagagtgattttaaatttcccttttcaaatacctcctctgttttctcttatttcctttatgacgtctccaaataagcttcctctaactgccagcaagtctgatttcattggcttcgactgttttcatcccaattagaggcagggttaagtacattaaaaataataatcaaatattattttgtttctcctcccagggcttttgtatgtttgacatggaatgtcataaaaagtatggaaaagtgtgggggtgagtattctggaaacttccattggatagacttgtttctatgatgagtttaccccactgcacagaggacagtctcagcccaaagcctcttgggatgaagctcttgtcaacctaactacaaacagagagaagttctctgaaagaagaagatatttatttgggtgtagagtattgcaatgggaatctgcatgcctttataaactatgtgcaaattcagggaagtaaagcaagacaaagaggctccaaggaaaatatgaggaggatttcttatcagttttgaaataattatccttcgctacaaagatcagtaacaagggtgacgcctcaccaaggttggacaggcagttgctgggcaggtgtccttgcagaaatattttttttaatgttgggatggcctttgtgcaagcttgtagttttgcggagtcttttgtgatagttttgttatcaggcacacaagcatgagaatcctctcttcatagccttctttgatttatttgtcagggtttttacacacacacacacacacacacacacacacacacacacacacaactagtgacatcattttggttctaacaacattcacactggttattgtaaaacttttcgaaggttgtcctaccaaggatcccatgtgtcaccaggtgtcaagttctacagtctgaactaggctgggagcattgtgattacttttctccagactttggtggcccagggactcacagcatcatgctctgtccagtgtctgcctattcccctcttctttttttttttccttaggtgcccttttattacatgtgttgtctcagacccttctaatatgtgctcataaatacatcatatcatctccttcccacatcaattcactttcaattaaaagccaaaactctttcatttagactttggatttaaagtgcttttgaatgaagggttgagagataatagagaaatagattggcaaaccatttatactctgctgttgttgttttttaattttatctgcaagtgtggaacttttcattctgttttgttattaaatttaagccaagactttttaatagaagggtatataagcatttctttgtctataccttcctgctgaatttgaagaaatgctgaatattcttaaccactggcgggctgatggactgtgattttattttattttttatttttagttttttaaattatactttaagttctgggttacatgcatagaatgtgtagttttgttacataggtatacacgtgccatggtggtttgctgcacccatcaacctgtcacctacattaggtatttctcctaatgctatctctcccctagccccccacccaacaacaggccccagtgtgtgatgtttccctccccgtgtccatgtgttctcattgttcaactcctacttaggagtgagaacatgtggtgttgagttttctgatcttgtgatagtttgctgagaatgatggtttccagcttcatccttgtccctgcaaaggacatgaactcattgtttttttatggctgcatagtattccatggggtatacgtggcacattttctttatccagtctgtcactgatggacatttgggttggttccaagtctttggtattgtgaatagttctgcaataaacatatgtgtgcatgtgtctttatcatagaatgatttatgctttgggtatatgcccagtaatgggattgctgggtcaaatggtatttctagttctagatccttgaggaatcaccacactgtcttccacaatggttgaactaatttacactcccaccaacagtgtaaaagtgttcctatttctccacatcctctccagcatctgttgtttcctgactttttaatgatcaccatactacctggcatgagatggtatctcattgtggttttgatttgcatttctctaatgaccagtgatgatgagcattttttcacatgtctgttggctgcatagatgtcttcttttgagaagtgtctgttcatatcctttgcccattttttgatggggttgtttgctttttttcttgtaaatttgtttaagttctttgtagattctggatgttagcccttcgtcagatggatagattgcaaaaattttctcccattctgtaggttgcctgtttgctctgatgatagtttcttttgctgtgtagaagctctttagtttaatcatatcccatttgtcaattttggcttttgttgccattgcttttggtgttatatttatgaagcctttgcccatgcctgtgtcctgaatggtattgcccaggttttcttctaggatttttatggtcctaggtcttacatttaagtctttaatccatcttgagttaatttttgtataaggtgtaaggaaggggtccagtttcaattttctgcatatggctaggcagtttcaccaacaccatttattaaataggaaatcttttccccattgcttttgtgtgtcaggtttgtcaaacatcagatggtagtagatgcatggtgttatttctgaggcctctgttctgttccattgatctatatttctgttttggtacctgtaccatgctgttttggttactgtagccttttagtataatttgaagtcaggtagcgtgatgcctccagttttgttctttttgcttaggattgtcttgtctatgtgggctcttttttggttccatatgaactttaaagtagttttttccaattctatgaggaaagtcagtggtagcttgatggaaatagcattgaatctataaattaccttgggcagtatggccattttcatgatatggagtcttcctacccatgagcatggaatgttcttccatttgtttgtgtcctcttttatttcattgagcagcggtttgtagttctccttgaagaggagaacttcacatcccttgtaagctggattcctagatattttattctctttgtagtaattgtgaatgggagttcactcatgatttggctctctgtttgtctattattggtgtgtaggaatgcttgtgatttttgtaaattgattttgtatcctgagactttcctgaagttgcttatcagcttaaggagttttggggctgagacgatggggtttcctaaatatacaatcatgtcatctgcaaacagagacaatttgacttcctcttttcctaattgaatatccatttctttctcttgcctgattgccctattcagaacttccgacactatgttgaataggagtggtgagagaggacatccttgtcttgtgccggttttcaaagggaatgcttctagtttttgcccattcagtatgatattggctgtgggtttgtcataaatagctcttactattttgagatacgttccattgatacctagtttattcagagtttttagcatgaaaggctgttgaattttgtcaaaggccttttctgcatctattgaggtaattatgtggtttttgtcattggttctgtttatgtgatggattacatttattgatttggtattttgaacccagccttgcatcccagggatgacgctgacttgatcctggtggataagctttttgatgttttgctggatttgatttgccagtattttattgaggattttcgcatcgatattctttagggatattggactaaaattctctttttttgttgtgtctctgtcaggctttggtatcaggagatactggcctcataaaatgagttagggaggattccctccttttctattgttcagaaaaatttcagaaggaatgataacagctcctctttgtatctctggtagaattcagctgtgaatccatttggtcctggactttttttggttggtagcctattaataattgcctcaattcaaaacctattattggtctattcagagattcaacttcttcctggtttagtcttgggagggggcatgtgtccaggaatttatctatttcttctagattttctagtttatttgcatagaggtgtttatagtattctctgatggtaatttgcatttctgtgggatcagtggtgatatcctttttatcattatttattgcatctatttgattcttcttttttctttattagtcttgctagcagtctatctattttgttgacctttttcaaaaaaccagctcctggattcactgattttttgaagggtttgttgtgtctctatctccttctgttctgctctgatcttagttatttcttgtctcctgctagcttttgaatttgtttactcttgcttctctagttctgttaattgtgatgttactgtgtcaattttagatctttcctgctttctctagtgggcatttaatgctataaatttccctctacacactgctttaaatgtgtcccagagattctggtacattgtgcctttgttctcattggtttcatagaacatctttatttctgccttcacttccttatttacccagtagtcattcaggagcaagttgttcagtttccatgtagttgtgtgattttgagtcactttcttaatcatgagttgtaatttgatttcactgtggtctgagagacagtttgttgtgatttcttttcttttacatttgctgaggagtatattacttccaattatgtggtcaattttagaataagtgcgatgtggtgctgagaagaatgtatattctgttaatttggggtggagatttctgtagatgtctattaggtcctcttggtccagagctgagttcaagttctgaatatccttgttaattttctgtcttgttgatctgtctaatattgacagtggggtgttaaaatctcccattattattgtgtggaaatcttagtctctttgtaggtctctaagaacttgctttatgaatctgggtgctcctgtatttgggtgcatatatatttaggatatttagctcttcctgttgtattgatcccatcaccattatgtaatgcccatctttgtctcttttgatctttgttggtttaatattctttttaaaataaaatattttaaacatatgaaacattatggagaatggcatgggaaatatccacgtatgcaccacccagcttaacaaatgctctactgtcatttctaaccatggtctctttgaagagctcttttgtctttcaatgtctcttccttgtttggcccacattatccttcatcatatgaagacttgagtggctcctgtgtcagactcttgctgtgtgtcatacctaatgaactagaacctaagattactgtgtattgtacaactaagggattatgtaaagtcaggatcaaagtctggcttcctgggttgggctccagctgtagaataaggctgttgatgtttaatcaactctgtttttttcacacagcttttatgatggtcaacagcctgtgctggctatcacagatcctgacatgatcaaaacagtgctagtgaaagaatgttattctgtcttcacaaaccggagggtaagcattcatgtgttgaaattaaaatactgattgattaaatttatattttgaaattcttatatattcatagacagttgcctaaaaaatgtccaggaaggttccacgtccacttcatcctgtcccccccgaatggtaacatcttgcaatcttgcataactataaatacagtatattcatgttactatatagtacaggaaattgacattgatacagttcacagagcttattcagatttcaccagctttatgtgccctcatttctgttctatgcaaatttatcacaatcatagatttgtgcaatgaccagcatgatcaaaacgcagaacccatttgtgttctatacaaatttatcacatcattagtagatttgtgcaatgaccagcatgatcaagatgcagatccactctgtctccatgtggctccctcctgctatcctacagtcacaagtctttttctctgacagggtccatatcagagcaaactattttttattttgaggtgatcaatgtattaatatttccttttctggattgtacttttggtgccatgtttgaaagttctttgcctagccctccttcctatattgctgtttttttctaaaagtcataaagtttaatgctttactaaatgtagctctattatcaattttgtgttattttttgtataaggtatgagatttagatcaaggttcattttttttgtggcttatggctgtccaattcctccaacgccatttttggaaagatgggtatattgttaaaaatcaactgggcatacttctttgcatctctcacgtactactgtgtcccattgatcactgtgtttattattccaccaataccacactgtgttgaccctagtagctgtacactaactcttaacctcgtgtagagtgattcttcccacttttattgacttattttttcagatttgttttaactcttcctggtcctctgcttttccataaaaattcagaatgagtttctcagtgtctacaaataaacgtgctgttattttgacaagaattgaattaaatatatagaccagtttatggaaaatgtgtatctttactgtttgatctttcaattcatgaacatagtatgcctctccatttccttagattttctttgattgcttttaacatcttgtagttttcagcatagagatcctgtacatgttttgttagatttacagctaaattatttcatttttgttggaatgactgtaaatgatattatgtttttcttgtattttcagatattgattgttgttacatagaaatgtgctttgattttgtgtgttgatctggtatcctagaaccttgcagaactgacatagtagttctagaagtctctttgtatatgccttgagattttacacattgtcagttatgtcacttgaaaatagagacaattcttttatttcctttccaatctgtatgccttttatttcttttcttttgtctattgcactaggacttcccagtataatgttgagtaaatgtggtgaatttttgaattgttcctaatcttaggagggaagccttcagttctttcatcattaagcatcatttagatgaagtgggctgtttttttgtagattctctttatcaaattgaggaattttctctccctagtttgctgagtttttatcataaatgaatgctggaagtactcattataaaaaaaatggctatggaagatgaaagaaagtttcaagcatgttggcttgataggccagttccaagttggcaaaaataattatctcttttttctttctatccatgaaataaaaaattaagagacaagaatgtttatggaattgcattatttcttcaaaatatgttcctagttttaaaggtattacctactattttttttaaaaccatcacattgaggcacttctttttcacgttgcccatgctgcaggagaacataaagacagcttgtctgaggcaacatacaatccaccaaagtcacctgcttgtctgtctccactccgtctctacactgcagaagtgctaggtcttgattctgtttattgtactggaagaacacattctctaccacgtggataatttgcatgtaaaagaagactgggatatagaggctggagacgacatcagggtctcctgaacactgccgccacccccccgccccgccccacacaaatacatcccaggacactgggcatctgggataaatctctattgagcatctagcatagggcccatcacccagtagacagtcactaaatagttgttgaataagtgttcctgtttaacacattttctacaaccatggagacctccacaactgatgtaggacaaaatgtttctgctttgaactctagccttttggtccagtgggatttatgaaaagtgccatctctatagctgaggatgaagaatggaagagattacgatcattgctgtctccaaccttcaccagtggaaaactcaaggaggtatgaaaataacatgagttttaataagaaacttaaagaatgaatctggtggggacaggtataaaataagatcacagtccctttccaaggggtagtccactgaatttgagctgcctaaaaatggtcttttatctttatgtacagaaaacacatcacaaaattcattataaaatgtcacttactgctccatgctggggaaagccatgtccttctgggactagagtctgcacatttaactatgggtggtgttgtgttttgtgcttagatggtccctatcattgcccagtatggagatgtgttggtgagaaatctgaggcgggaagcagagacaggcaagcctgtcaccttgaaagagtaagtagaagcgcagccatggggttctgagctgtcatgaacccctccagctgcctgccatggagctgatattcctgctgttgggttattccagtgaccagacaaaaggagggctgtggtaatgcaacttcaatgggtctcccaagatggggcagctccgatgaggaggtggggcagctggaggaaaaggatcttctcccctgtgcacaggggccagggtttacatatccattaaattgtcaccttggatattctagaagactaaatatatcctttagggggaaaaagtgtgattgtaccaaagttttaagcatggagtgtatgggatggtggaaggggaaggcacttggtatctgttggttggcagtgagtaggttgggagagttataatggagaacttagaataactttgatcatttcatgtttttttctgaggatatcagtagaatactaaatattaaaattcctaccatttctttttcctccagtctcaaagagagagggtggtaaaaacactataggtagggcaagcctattatttgctatctacacttatgcagtaaaaacaggtgtaatctgagtttgtcctgggcagaccagggatatgtggtcactcactatagaaatttccaaatcaaattttgagagatttttttttaaccaggacattattggtcattatattttacaaaaataattctgctgtcagggcaacctcagctcaccacagctggggatagtggaattttccaaagcttgagcagggagtatagagaataaggatgatatttctaggagctcagaacagggtactgttgctttgtaaagtgctgaagaggaatcggctctgggcatagagtctgcagtcaggcaatatcacctgtcttgagccccttaggaagagttaattattctactcttgttctgctgaagcacagtgcttacccatcttgtatcatccacaatcaatacatgctactgtagttgtctgatagtgggtctctgtcttcctatgatgggctccttgatctcagaggtaggtctaattcagttcagtgtctccatcacacccagcgtagggccagctgcatcactggcacctgataacaccttctgatggagtgtgatagaaggtgatctagtagatctgaaagtctgtggctgtttgtctgtcttgactggacatgtgggtttcctgttgcatgcatagaggaaggatggtaaaaaggtgctgattttaattttccacatctttctccactcagcgtctttggggcctacagcatggatgtgatcactagcacatcatttggagtgaacatcgactctctcaacaatccacaagacccctttgtggaaaacaccaagaagcttttaagatttgattttttggatccattctttctctcaataagtatgtggactactatttccttttatttatcttgctctcttaaaaataactgctttattgagatataaatcaccatgtaattcatccacttaaaatatacagttcagtgatttgtagtacatttgaagatatgtgtgaccatcatcattttaaactttaaaactttttttgtcaatctagagacctcatacatttttagctatcagccccctgtcacaaaccctgtcatcatatgcaaccactaatcaactttctgcttctatggatttgcctattctggacacttcatagaaatgatattaattcatcagggttttttattctctagttcatgaatttgtactttagtctgtatcattttctttcttctgctggcttcaggcttagtttgcccttcttcgtttactatgttgtggcatgaacatagattactgatttgtgatttttttgttcctctaaatttagacattacagctgtaactttccctctgagcacttcctttgctaaatcccatgagattgtggtctatcacatcttagtttttgttcacctcaaaacagtttctatttgcccttttggtttctactttgactcattggttacttaaatgtttattatttaacttccacatatgtgtgagtttctcaattttctttcccttattgattttatctttattccatgataggtgacagagatatgctgtgttatttctatcttgactacctactatttcttgaacagcaagattaattttgagcttcagattatgatttgggttattctaggagactgtagtccaatagataaaggcaaagagattagggcattgaattttgttccttttatccttcaaaagatgcacaaggggctgctgatctcactgctgtagcggtgctccttatgcatagacctgcccttgctcagccactggcctgaaagaggggcaaaagtcatagaaggaatggcttccagttgagaaccttgatgtcttttactcttctggttggtagagaaaactagaattgctccaggtaaattttgcacattcacaatgaatttctttttctgtttttgttttgtttttcctacagcagtctttccattcctcatcccaattcttgaagtattaaatatctgtgtgtttccaagagaagttacaaattttttaagaaaatctgtaaaaaggatgaaagaaagtcgcctcgaagatacacaaaaggtaaaatgtggtggtagttataggaggatgtttagtttttcataattttttagataatatacatatgatcagtgcagttacctgtatgtttttaaagaatgcttttaacatgaagactgctcatgtttagagcaagagaattcatttggtagaaatgcagaaagtggggtttggggaaggagatatgagaatgagtcagagacagcacatgaaatttgatatcagacacaacaattagtatgccacggcataaattttattgagataaaactttaccactttacttcccttcaataaattgtcagaggataaacattactgtttggaaatatattttactgatattatgctttccccagatcataaattggtaaagactcatttcaagtacaaacctgttattttacacattctcaaatgaaagtccctatcaggccacctgctgaagtgtagcgtgtgttaaatttgagccatctcacatgatagccagatttgtttcaggaaaacatcctgctttccaaggatttagaagggtatgtttttcactggtgattcaggcaacatgcatcagatttctggtcttcaaggagccatattctcagaagggagatcaaggaccacgcttgtgatttacttctgacttcaggagccactttctgtcagtgaaatttctctttttgcttctagcaccgagtggatttccttcagctgatgattgactctcagaattcaaaagaaactgagtcccacaaaggtaaccagagtgtttctgagggctacttgtggggcactcagagggaaggccttgttctgaaaatgtgcaggaagtattccaggatgatgagaatttctgccacatagcagaacgacacatgtttgaatgttataagtggtagttggaggcactttctagaggcatgcaggcatagatagccatgttctaagagtaaagggcaaccctaagcaaacctggcatgctagaaagtcagtctgcggtctgtggatcacctacatcagatcaaatgccaattctcagcctccttcagatccactgaataaaaatttctgcctagaaatttattaggttgctgcaaaattaattgtgggtttttccattacttttaattgcaaaaaaatgcaattaaaagtaatggcaaaaaccacaataacttttgcagctacctaatacatctaacatccaatcaggagccacgctgttccaaaaggggtgattttaactggcagtacttgttgaaagtgtgttcaccaggttaatctactgcaaagttattttccactttggaatggattagtaacttgtggggaaaacctctgagaccgtgtaaatatcctctttgtcttcaatgtttcacctacgagttttacaacccatgtatgttttttactgaagtcactattactatgacagtggcaaaatgatgaccatggtcaattacaagccaccaagacttggcaaccatctcacaaaattcctgaatatttaactattggttctagagagcaggactgggcttactccagcatactgctttaaatatatccatgtctacatccacttttgtctgtatgtctatgtatctatctatgtatctatctagctatgtatctatctatctatctatcatctatctatctatcatctatccatctatcatctatcatttatccatctatcatctatctacttatatattatctatctatcatctaactattcatctatctatcccaatataacttgctgtgataaaggaaatagtctattgttttactgtttcatatagaaatcactagacacatatggctattgagcactggatatgtggctagtgccattgaagatcaattttaaatggtatttcagtttaatttaataaaatttgattttaaatagccactagtgggtagtggctaccatattggacagcagagctctaaactttgagattatagttcaatttcacatcagtatcatcaggttcatgataactgaatactatgattaggtagttgaatttacttataactgcatcacagaagtcttcactggtaaatcacagctctgtcgacctttctcacactcctttcatattggttttggttgtgaattacatggttggagcaggcattatatttatttctatgttccaggtctctaaaggtcctaatccagtcctgatcaaacagaccagtgatggaccatcctgagcttctctcaggagaaaaatcaagaggggcccaacttgtaatcataggagcttatgctattttaatgccatccatcagactacaatcaattaccactcatctagctttttgtccatctctcattcttgtacatcctgagatagtcaattctgagaactgtagcctagatctatcacctgatgcctctcaaagatataatccgtgcttctcaagctaggctatgcacacaaatcactgcatcttgtgaaagttcagattttgaatcagtagttcaagggtggggtttgagattttgcatttctaatgagctctcagatgcttctgacccatggaccacactttgaataccaagaagtggtctgtagaccaatattggtcccttaagttccctcaaacatatcttcgggaaacgtcctttgattttccctacatttaaccattagtgttgcaaattctctcaaagtttgtcaagatatattgtagctaaaataaattacatttttcttgggggagagtactacctcatattaacttacaataaagtacttttaggatcattcaaggaacacacccataacactgagtatgttatgcggaaatgctctctctggaaattacacagctgtgcaggtggcgggggtggcatgaggaggagtggatggcccacattctcgaagaccttggggaaaactggattaaaatgatttgccttattctggttctgtaagatacacatcagaatgaaaccacccccagtgtacctctgaattgcttttctattcttttcccttagggatttgagggcttcacttagatttctcttcatctaaactgtgatgccctacattgatctgatttacctaaaatgtctttcctctcctttcagctctgtccgatctggagctcgtggcccaatcaattatctttatttttgctggctatgaaaccacgagcagtgttctctccttcattatgtatgaactggccactcaccctgatgtccagcagaaactgcaggaggaaattgatgcagttttacccaataaggtgagtggatggtacatggagaaggagggaggaggtgaaaccttagcaaaaatgcctcctcaccacttcccaggagaatttttataaaaagcataatcactgattctttcactgactctatgtaggaaggctctgaaaagaaaaagaaagaaacatagcaaatggttgctactggcagaagcgtaagatctttgtaaaacgtgctggctctggttcatctgctttctattactacaataatgctaagtaaaaaacctccaaaaacctcagtggcatctaacaataagcatttgttgctcacactcatttcacattggttttggttgtgaattacatgtttgcagcaggcaccatagtggtgtgtgatgtccccttagctgtatccacatatggacacaggaatttgctctttttatctctttttattttcttggttacagacatgtgacttttttttttgaaaggtaacaatcactttctcatatgttatttgatgctagtggtcatagcctattagtcacatttgtttcaatgagaaagaaaaaccagtacacggttatgctaaggatttcagtccctggggtgagagccgtctcgaatgtctccccacttcataactcctccacacatcatagttggatagtgagctctgctgatattggcaggacttgctctggtctggctgtagtctgacggagcctggccctgggtgtgctgtgcaggctgactcagctctccccacacctatctcatgttccagtcaggcagtaactggtgaagaagccaagctaggaaccaggatatctggctcctgagctaaagtcttaaaacactatcatattgccttccaaatataacaccaaatactaggtgcatatcacccacactgttttcagacctctgccaaaattgggattctttgtggtatgaagagacacggctttggggctggcccggctgtggcagtgaggtgaacacaaagggatgttcttcagagattacagtccagccctgaagcaacaactaggagactgtttcagcaagtgaggacagggctgtgtggggttctatcctctttataacttccactagcactgaaatcgtgttctctggttacatccaaccagaaccttctttgtcatttttgggatagaaagggactagtttatcctcaaattatttatggagattttatataatatagtgtttctctccacattttctgtatataacaaaagtcctccttttagtgtgtgtatacacatatatatacacatatatatgtgtgtgtgtatgtgtgtgtgtatatatatatagacatatatacacggttatgctaaggatttcagtccctggggtgagagccttcccgaatgcttcccaccttcataactcctccacacatctcagtgggccactgagcacagcaatgggcatgacagttattaaaacactttataaatgcttcgatcctttaccagtatgagttagtctctggagctcctaatacttcattagtactgcatggactgagttaaaagttaattcaaaatctcaatttatccaaatctgtttcgttctttccaggcaccacccacctatgatactgtgctacagatggagtatcttgacatggtggtgaatgaaacgctcagattattcccaattgctatgagacttgagagggtctgcaaaaaagatgttgagatcaatgggatgttcattcccaaaggggtggtggtgatgattccaagctatgctcttcaccgtgacccaaagtactggacagagcctgagaagttcctccctgaaaggtacaaggcccctgggaagggagccctccctgaaccagcctggttcaagcatattctgcctctcttaatctacaggacagtcatgtggttgtataattatttgcttgtatttttatatttagagatttttttaatcatcaaattgattattgtcacactttacaaaccatagactagaaaaaagaaaactacagtcatccacaattccaacaacttacgatgaaggtcatcagttatgtccttatgggtcatcagtgtccaaaatgtaaggactcttttaaaaacacatgatcacaatgctattattatgtcccccaaatgaatatttttttcataaatataatcaaatatttaggaataacattttaataaaaaacatgcatctaatcttcaaagaattttatagcttactggaacagatagacaaagaaagcagtgatgatactgcattacatcggtacagtagcatcatatgcctgtgtaaattatctgacttcaactattctatggaggtgtgggggagaaagagggagagatggagagaagaagaaggaggagaaggagggagaagacaaggtaaggaggagaaggaggagaattagaaaaacaagagaggagatgagaaggaaagtgcaaaataacaattttgaaatagtacaagacaatttccccttctccttcctcatgaccaatgtaagtgtgacttgaggcaggaacctacttttccatcagtcagtcccatcacttatgtgccttttatagtgtggacacatcaccaccctgaatataatttcagtgtttagaaataagtattctttgcaacactatttatctcatctcaacaagactgaaagctcctatagtgtcaggagagtagaaaggatctgtagcttacaattctcatagcaaaataagcatagcaggatttcaatgaccagcccacaaaagtatcctgtgtactactagttgaggggtggcccctaagtaagaaaccctaacatgtaactcttaggggtattatgtcattaactttttaaaaatctaccaacgtggaaccagattcagcaagaagaacaaggacaacatagatccttacatatacacaccctttggaagtggacccagaaactgcattggcatgaggtttgctctcatgaacatgaaacttgctctaatcagagtccttcagaacttctccttcaaaccttgtaaagaaacacaggttagtcaattttctataaaaataatgttgtattaataattcttttaactgagtggtctgtattttttaaaaagaatatgcttgtttaatcttttactaatttgttctctgggccaaagaatcaattaggcccatctgtgatctttaagggtgcttcagttctggagttcaaaagctgtagcatcaaaaacatcatgtaaagcccatgtagattagcatggcataattatctgcagtctccttgaacttgagcaaagtttacattcagtttcaagtcgattggaaagatggggaagtattttgcacagtcatgaagtgtaatgattaccttgttgtgacttttgaatgctgctcttcccaaccagaacttggagaagctttctcatgagagtggctcccaaccactagctgtacattggaatcaccagggagctttaaaaattcatgatgtctgggatatcacagaaattctaaactaatttgcccagagtgtggctttaaaagcttccccattgcttctcatgtgaagccaaggttgagaatgactaatttaaggcatttctggtggatataaaggactaccacagtccaaggccatcctgactgacctcaccttccaggtgcctagctccatccagctgggctccttttcaacccaattataactctattaatgttgttcccagccaggcatggtggctcatgcctgtaatcccagcactttgggaggccgaagcaggcggatcatgaggtcaggagatcgagaccatcctggctaacacggtgaaaccccgtctctactaaaaatacaaaaaattaccctggagaggtggcaggcacctgtagtcccagctactctggaggctgaggcaggagaatggcatgaaccccagggagcggagcctgcagtgagccgagattgggccactgcactccagcctgggtgacagcgagactctgtctcaaaaaaaaaaaaatgttgttccctttctcctcattttgttcttatctttcaagtcctagttcaatccccaagcccctccaaagtgtcttctcctcctagtccagggcccatttacttctctgctctgttattggatactggaggctattatcataaatttgacaatttgccattaaatcattgagttttattctctatattttctttgtatctaaaatgtcttcccccctccattaacaatatcctctcattttattcctttttaaaatatcccagtggtgccttgcaagggactgtatctaatgcaagcatttggtaaatgtttaaggagtgatgtgcagttgatggcttgcatacatatattaagctatttaatgtgaacctttaaacaaatgccattcgtgcatatgcatgtgtgtgtgtgtgtgtgcacatgtgggcatgcatgtctgtctgcagtgaaaatatattcagggtttttgaaaatttttaaataataaggtattatatttatagaaagatttgaaatattttctctgaagaagttaaagaacagacgtcattgattcatattaaacaataccctataaatcttatttctaggtctcatgtatttattattcaattccaccccttaagtaggctttctatataggagaggaagaagacagaaatagtttccatattatttccatattccatattatttgtggctttaggccagcagtgtagctgtattatatgtgcccagacaggggactcagccctgaataaaagtggtcctctggcacacctgggatggggaaggtactccttggtaagctcccaacctggcacttcttgatctccctggcaattttcttgcccattactccatggagatcagaatatcactctgttgtgtcccctcaacacggaaggagtgtctcaataagaatggggctaaaagttgagtccaaacactgtaggaattgagaggttccccacttgcactacccttggaagccaagagaagatgttaaaaaataaaatggtaatgcttcctgaaggtgtcttcccatctttacactggatgggttcaattgggaggaattactggactctggaagttgaagactgtccatataattaaaatgtacaataactacccaggtttaccttgcaagtttcaacatacacaaaattaactttatatgactcttcaaaaacagtttgccatcatacctaataatctggtttaaattttaaaaactcatccattttacttaaaatttaaatcaaaaaagaacacaggtttccatgaatttgtctcaggcctggcacagaatagtactccataaatattttgttaaatgatagatgatgaatgctctcactgtccaatcttcacacatcttatagactaagtataaagaatccaagatttatagtgctgaaagtagtttttatatgtttacaaagcattattgtcattactgcattttttttgcccattactccatagagatcagaatatcactctgttgtgtcccctcaacactgaaggagtgtctcactcactttgatgctatactttctacttttgtttatttaatgcttctcaatatgcttgtttaactgttgcagatccccctgaaattaagcttaggaggacttcttcaaccagaaaaacccgttgttctaaaggttgagtcaagggatggcaccgtaagtggagcctgaattttcctaaggacttctgctttgctcttcaagaaatctgtgcctgagaacaccagagacctcaaattactttgtgaatagaactctgaaatgaagatgggcttcatccaatggactgcataaataaccggggattctgtacatgcattgagctctctcattgtctgtgtagagtgttatacttgggaatataaaggaggtgaccaaatcagtgtgaggaggtagatttggctcctctgcttctcacgggactatttccaccacccccagttagcaccattaactcctcctgagctctgataagagaatcaacatttctcaataatttcctccacaaattattaatgaaaataagaattattttgatggctctaacaatgacatttatatcacatgttttctctggagtattctataagttttatgttaaatcaataaagaccactttacaaaagtattatcagatgctttcctgcacattaaggagaaatctatagaactgaatgagaaccaacaagtaaatatttttggtcattgtaatcactgttggcgtggggcctttgtcagaactagaatttgattattaacataggtgaaagttaatccactgtgactttgcccattgtttagaaagaatattcatagtttaattatgccttttttgatcaggcacagtggctcacgcctgtaatcctagcagtttgggaggctgagccgggtggatcgcctgaggtcaggagttcaagacaagcctggcctacatggttgaaaccccatctctactaaaaatacacaaattagctaggcatggtggactcgcctgtaatctcactacacaggaggctgaggcaggagaatcacttgaacctgggaggcggatgttgaagtgagctgagattgcaccactgcactccagtctgggtgagagtgagactcagtcttaaaaaaatatgcctttttgaagcacgtacattttgtaacaaagaactgaagctcttattatattattagttttgatttaatgttttcagcccatctcctttcatatttctgggagacagaaaacatgtttccctacacctcttgcattccatcctcaacacccaactgtctcgatgcaatgaacacttaataaaaaacagtcgattggtc

SEQ ID NO: 137 - DNA, 31805 bp, Homo sapiens
ctgctgtgcagggcagggaagctccaggcaaacagcccagcaaacagcagcactcagctaaaaggaagactcacagaacacagttgaagaaggaaagtggcgatggacctcatcccaaatttggcggtggaaacctggcttctcctggctgtcagcctggtgctcctctatctgtgagtaactgtccaaactcctctctttgtttccttggacttggggtgctaatcgggccccttttcccttatctgttttgaagatcaaaagagatgttcaaggagaagtagctgaagtgttggacgctacaaacgcatagaagttattattatcttatgcagatctatgaatgaataaataagcatttctcccatccaccttctaattttggtgactaggagggtttagggacagcatttggtagtgggaatgatttgattagcttagatctgacgaagactaatcaatgaaaacatggcagcggcagattacaaactgctgatcatgatggacagtgtgatcctcatccccttcccaggctctggggattctgggtacaggaaggagtggcttgcatttttgtctcattaattcgctttctgggttctgtgtctgctggaagggatgtgtagctgtattgcccctgtagacctggttcctgctcccccgccttccaacccaggatatcatttacataacgcaccaggggacaccaagacttcatgggaagctgtcccctggctcttccctctttcctgtgccatgcccctgaaaatcccctccctcctatgagtcactcctccaccctgtcatacacaggatggtttatcttgcaatgattaacctctagagcaaaggagacctggaggaagtttcgaggatttattctttgctttaatctttttcctcccgtctctgggaggctaggattaatatagagctttgtttctcacctaatgggaatctactagcagcctgaaaaggcaggagccatgaaagccaatttggattttacatatttttcccctttatgttacagtacaggagggcaaaccctctcactggtgggattcctggcatcctagagcaggtggagagaagagttactttccactgtgggtagtggaggctccacctgtcccattaacttctacctcaatttgacttttattaagagcagggaaccacaatgacatgaaaatagacactataaacctcattttaattctttcacagaaagcttaggaattcagtgagttgtggcaacatggtttccattgtctaacatttttaaatgaattgatatggtttaaattcattcatttttaaaccagaattttttggagatagactatttccagcatgttccttctggatggtaaaacagggctgttagttcagtatttgtgacaataagtgtgtgtaaaataatgtcacctttcctgaatgtcaggaatatgagtctaatgcacaaatgtatacctctaagacaagactgcacgtcttttcaaatatacctgtccggccatttattttaataactccttttcgaatatacctgcttagcagattgtcttaaactctcaggacaggggagtaagcaagactgtgagccagtgacgatagcaaaggcttccaggtaggatccatatgaagtgagaaaatattcctcagctctcagggtagaactccaaagagatattcatgggtcctggccccaccgtggaggtcactcaaagggcaaacaggttggcatctcatctgcttcaagcctggacacaggggcaccatctgtgtcactctgtgtgtggtctgccatgttgtgggccggtcactacagactcgggcagccaggcagacaatgccttagccttagacaatgctggtgcagcccaggagtcagaaaatgcagtgtagaccaggccctccttaggccaacacaattacatgcaatagatgactggcttttctgttagtctcttcactggacccaaaggctgcattactctaccagaggggagctggaaagaaactaaagagttcgcccagcacagcatctgccttgacatggtaccatgtgaatctagacactcaccaagatctttccttgggggccaatgctgctgacacattaactcaatagcttgtcctcacctgagaggtcaggtaatgtgtttaaagttcaggagcagagattagtgtcattgatttgacatggctgtgacaacaaaggagggaactgaagtgggaatacccaaggccaccctggctttggcaggtggtgcacgcacttccactaactgttctggggcagggaaccaaatgtatgactgggcctgctcatgctgcccctgctgagtcctccaaaccctgcccttcatgtaatttctcagttttattttatcacattttataagtcactggatgtttacaaaatgtttggaacctatactgccttgaaggctaacctctaaagaggagtaaacaaggtcttaatacaactctccgggacgttttatcattacttatcttatatgccatactgcaccatttgctatcaacaggaaagtacctggactttggaaggtccctctgtgtcttttagctgaaagtacatatgaggcatgtggattcttttatgcacatcatctttttcagccacatttttgtagtttgcctctctggagccaactgtgtggggctagcagcttcacagctgaatcagtgtctggcaacctcttccttcagcctctcttcttcctccagttttccatccctcagtcacaccggagggggaaggtctgcaaggatccagaaccatcagttggaggagtttgcacatgactcatgaaagatgagttccaggcaggcctgccatagtgaacaccaggcttaatgggtttttcctcagagatacttcacgtacagaggcagtgaactgactgctttctggttgaccaccttgaaaaagatgagtgtgcctggcactgtgcttctcaggtgagtatgacctgagaagtattagttgctggttcttctgcacacaatcattcaaggacatatggatcaaccatcctcctcaacagctcaaatcaaccagatcatctgaccacagagactgaggtgtacctgaaagctgcccacatttctataaggccaatagaagccatgaacacagttgtcaatctgtagaaataaggactccatgactcctccaaggcctctctgtgaatgaacgtttaagaagggctagatcctaaaacagggtcagagcttagagggaagaaaaagcataaacatttctgagcaaattgtaagggcagtgtcaccataggctcccagtgaccctctgtgattgagtgcatacagtgatgcaaaatctcatcatcagtgcaaaagacaaaaaaaatcttactctttctacctaggatgagagtccccaaatcagcgaagagtccacttactaaacagacataaggaaatgaagtgtcctggaagaattcctgcctgaacctctcaggagcatttgaggacatttatcaagtattcactccaggattgggactatgaagacttcagctgctttcagctaatcattgagacttttcaggggtctcagaatagtcaggaaaggacctgatgagtgaatgcaattactgatgttggagttgctgttattatttatcgtgtacatattacctccctctcttgaccattccagttcctgagtaactcaccagccctctgatctataaagtcacaatccctgtgacctgatttctgtttcactttgtagatatgggacccgtacacatggactttttaagagactgggaattccagggcccacacctctgcctttgttgggaaatgttttgtcctatcgtcaggtgagttgcttgagcttcctcttttgcttcttatggttgcaaacatcagcttagttccatcagtaaaaatgcccctccttgggagggagttctgaggtttcacattttcagaaatggtgggactgggtgcagtggatcatgcctgtaatctcagcctctgtgaggccaagactggcaaattgcttgagcccaggagtttgagaacagcctgggcaacacagtgagacacctgtctctagaaagaaaaaattacctgtgcatgatatggtagcccatgcctgtagtcccagctactctgaatgttaaggtgggaggattgtatgaacccaggaagtcaaggctgtattgagctgtgatcgcaccactgcactccagcttggtcaacagaacaagacagaaaggaagaaagaaagagagagagagaaagaaagagagaggaaggagaggggaggggaggggaggggaggggggaggagaggagaggagagaaaaggagaggagagaggagaggagaggaaaaggtgtgtaggctccacccaaagcatggccaggtttacccctggagggaaagtcacaagctcatgtccagaaggccagtagcagcaagctgctctccagcccagatttcctatcctgtgtacctggagcttgtttctcagattctaactctcacaactgaagcctctgttgtctgattactatctgagaattctacacaattttaccctcgataaaagcagtaatttcttcttcatctttcccagatcaactcttgtagtagatcaacatttctgggaccttcttttgcatggttaaaacatcacagctgaatcttagcaacaggaaggtttgtttttatgtttcagaagtgaaagctcagagcacgcattgtaatttgctgggtgtgatgtgtagaggtggcatttctccatcttttctgtgttaagctagaaaactggaaaggaagtctactttctcattcactcactcactttctcactcaacaacatgccttagacttatctaaatctgcaagactaaaagaggttcctggtttctttaactttctaattctgctagagttctagagagagcacatgagataaatgaaaaggatactgatggaggagattaaaaaattgtgcattccctgcagacactcacttttcctcacctcagtttcacccctgcccttgcaggtgatcattcacggggttaggagactttagagagaataaaagaaaaagcaaaaatacatcagaaagacaaggaattacttactggtcatagacaagggtgagtccttcagtacttagagaaaattcaagagtgactttaaattccccacttcaaatatattctctgttttcttgtctttcccttaagacatctctgaatagcttccttcaactgccagtgaaagatagcaggcctgatttcattggacgcaactgttttcagccccaattagaggtagggtttattctatttaaaataataatcaacttgtattttgtttcctctcccagggtctctggaaatttgacacagagtgctataaaaagtatggaaaaatgtgggggtgagtattctgaaaacctccattggatagacctgctactgtgaggaggttaccccactgcaggatagtctctgcccaggtcttcatgggatgaagctcttgtcaacctaaatacaaacagagagaggttctctgaaagaagaggataattacttgggagtagaatattgcaatgggaatctgcttgccgttataaactatgtgcaaattcagggaggtaaacaagacaaagatgctccatagaaaatatgagaagaatctcataactgttttgagataattattgttagctacaaagatcaataacaagggtgatgccacaccaaggttggacaggcagttgctggacaggtgtccttgcagaaatatttttgtgtaaagttgaaatagcctttgtgcaaagttgtggtttttgtagacacttttgtaatagttttgtttccaggaacacaagcataagaatcctctcttcatagccttcttgggatttatttgtcagggttaaaaaacaattagtgacatcactttggttctgataaagttcacactcgctattgtaaaacttttcgaggcttgtcctaccaaggatcccatgtgtcaccaggtatcgaggtcttcagtctgaactaggctaggagcattgtggttaccacttttctgcaggttttggtggcccagggactcccagcatcgccttctgtccagtgtctgcctattcccctcttctttttttcttccttaggtgcccttttatcacatgcattgtctcagacccttctaatatgtgctcataaatgcatggcatcatctccttcccacattgattcactttcaattaaaagccaaaactccttcatttagactgaatttaacatgtgcttttgaaagaagggttgagagataatagagaaacagattgggaaaccacttatgctccacttttttaaactttctctgcaagtatggaattttttgttctgctttgttgtttaaatttaagccaaaacttcttaatagaaggatatacaaatatttattggtttataccattgcacttactttgaagaagagatgctgaatattattaaaccattgtgttccctggtgggctgatggactgtgattttataaggtggtctcagccaattgcagcagctgttccctgtcagaggggctagaggtttggtgagagcagtggatgaggtgcagtggtgtgtttgttcactagaagcaagtgggagaaagctttgcctctttgtacttcttcatcttctcccctcaagtcctcagaatccacagcgctgactgtggagtgctgtggagctggcatggcccatacaggcaacatgacttagtagacagatgacacagctctagatgtccatgggccccacaccaactgcccttgcagcatttagtccttgtgagcacttgatgatttacctgccttcaatttttcactgacctaatattctttttgataatgaagtattttaaacatataaaacattatggagagtggcataggagatacccacgtatgtaccacccagcttaacgaatgctctactgtcatttctaaccataatctctttaaagagctcttttgtctttcagtatctcttccctgtttggaccacattacccttcatcatatgaagccttgggtggctcctgtgtgagactcttgctgtgtgtcacaccctaatgaactagaacctaaggttgctgtgtgtcgtacaactaggggtatggattacataacataatgatcaaagtctggcttcctgggtgtggctccagctgcagaatcgggctagtgaagtttaatcagctccgttgtccccacacagaacgtatgaaggtcaactccctgtgctggccatcacagatcccgacgtgatcagaacagtgctagtgaaagaatgttattctgtcttcacaaatcgaagggtaagcatccattttttgaaatttaaataatgattgatccactgattaaatttttattttgaaaaaaacatatattcacagaaggttacctaaaaaatgtacaggaaggttccatgtactcttcatcctgtcccgcccagtggtaacatcttgcaatcttgtatattgcaatatatatctagtatattcatattatcaggttggcacaaaagttaaaatggcaaactacaggctgggcataatggctcatgcctgtaatcccagcactttgggaggccgaggcaggtggatcacgaggtcaggagttcgagatcagcctgaccaacatggtgaaaccccatctctactaaaaatacaaaaattagctgcgtgtggtggcatgcgcctgtagtcccagctactcagtagtctgagacaggagaatcgcttgaacctgggaggcggaggttgcagtgagccgagatcacgccattatactccagtctgggcaacccaatgagactccatctcaaacaacaacaacaacaacaacaacaaaaaccggcaaactgcaataacttttgcaccaacctaatactatagtacaggaaattgactttgatatagtttacagagcttttcagatttcaccagttttacatgcccttgtttgtgtgtgtttatgtgtgtgggtagttctaagcaatttttcacattcgtagatttgtgcaacgaccagcaccatcaagatgcagacccattccgtcaccatgtggctccctcctgctgtcctacagtcacaacatggagtttgtctttttctctgacaggttctatatcagagcaaacttttatttatttgaggaggccaatgtattaatatttccttttatggattgttcttttggtgttaagtctgaaaatcctttgcttagccctccttcctacattgctttttctaagagttatatagtttaacactttacaaaatgtaactctattacccattttgtgttaatatttgcataagttatgagatttagatcaaggttcattttctgtggactatggctgtccaaatgttccaacaccattttggaaaggtaggcatattgtcaaaactcagctgagtatattttgtgaatctatttcttattgtttactcctccactaataccacactgtggtgactctagtagctgtacagtaactcttaacatcatatagggcaattctttccactttattgatttatattttcagaatggctttagcttttcttgtcccttgcctttccataaaaattcagaataagcttgtaagtgtctacaaacaaacctgccataattttgataagaattaaagcagaggtgtccaatcttttggcttccctgggccacagtggaagaagaagtgtcgtgggccacacataaaatacacacacacacacacacacacacacacacacacacacacacacacaaatggtctgtgtatagttttcattatatatctaccaccacagataagcaaaaatgtccttgcataataatcctaattatgcactgccccattcagagggtctttcaaaatcattgaacaggttccaagtttgcaatcactgatacagaaaatgtacatatctagctaaacttcactacttttttgatattttttattataaaagaaaagagaacaacataaaactagtggggtacttgacattgtttttgagaaactaatccatcagtatctggcttgatggaagtagttgcaattctcagtgagttctcaaggtgctcatcagatattttggttctaattttactcttcgtgttcttcatccttgaaaatagtagctcacaaatgtaagtgctgccaaaaagcaatgacatgaacaaggtgtgattgtgaagcaagggatatttgtcattgggaagacaggtcttacaaaagtccagtaaagaggcaaaatcaaatttttctataagttgaacatcagattgcagctctaggcattccatttcaaaattgccaggtaacatatatatgtcgactgaaaatggagttgcaaatataccaaaatattgatgattttttcagaaatcttgaaatacctgttttcaaattcctgtatcaaattgaaaagcaaggctgcgtatttttggctgttcacaggaccatgtttagccaacatgtcgaaatgcataaaattgtttgccttaatttgagcttgccataatttcagtttcatatggaatgctgttatggtttgaaacattgtattgttaagttggttttcaacttgaagacacaggtttaactcacttaaatgggccgtcaaacccactaaaaatgctaaatctgtaagccagttttcattgtcaagttctggcaccaattttgtttgataccataaacagcttgatttcacatcacaaagcataaaatctttacattttgccttgacttaaccatcttacttctaaaaagtgaatgacttgctagagtcagcatccatacttttaaggaattcctgaaactagcgatgattcaattcctgggcccttgtgaaatttacagccttgatgacaatttgcatgacgttatctacttttaaagcttgtgcacatggattttcttgatgtattatgcaataatacttcatcaaatgtgagttttgtgtggcaactgcatcatctattaattgtacaagtccctctcttttacctaccatcgccagggcagcatctgtagctatatcacatatgtttacaaaggacaaagaaaattgctttaacatatttttcactgcttcatataaatctcttgatttagttgtgtcttttaatagcatggtgacatttcgatttcttcagtgacattatattcatcatcaatacctctaataaaaatagcaagttgtgccgtatctgtagtgtcagtgccttcatccatcaccaaagcataaaattttaaattagcagttttactctccaaacgtctttcaatagatttcccaatttctccaattctcctggctatagtctggtgagacaaactgattttagaaatatcagtttctcaaggcaaataatatctaccacatcttccagacattgcttaataaactcaccatcagtaaatggttttgatttttttgctattaaatttgctaccacataactaggttttaccttacgattgagtccgagttgtaactttttaaaaaatcttttttgttgaaaagacagactttttttcagttctgctattttgtccttacaacacatacacaccaaatttgtcagcacgtttttgcatataatgcctcttcaaattgtagtctttgaaaactggcacaaattccgtggaaattaagcagagtgcttcgctatttgcctcaacaagaaaaagtcatttgtccacttttcattgaacaatcttccttcatccataatttttgttttttagggttttctttttaagacattgtggaagccattctggaattaaaagcattataatagataagcaactatatttacttttattatggaaattaacagataggaaaatagaacagaaagcaaggtttaataatcaaataagaatacttacatgtcttctaaataatattaaacacctatcatctacaaaggtaggttgaaatattattgataattgctgggttttacttgccaaattgccacaaacacacctaatacctgacagtgtcaattcaactgtccgtgattagaagataacacactggaagtcgcacaccaccataaaactgaagccacacatgcgtacaaatggcgacagtgtctggtgtacagcagcgctctgccttgtccagaatacacacttgaattctttgtcacaattcacttcacgtggcactgcaatagcgtcctctcgctctttgttagttaattttaatggcttttaatttcttcttgctgaactgtttgcaattataatgcaaattatggatactagtccattatttgtggatgtgacatactctgattacccctttccattccattgttgtctacgaagttcacacttgagaatcacatagtcaaattacaaaattacaaaaaaaattgcaaaaaaactcaaaatgttttaagaaagtttccacatttgtattgggatacattcaaagccatcctggactgcatgaggcctgcaggccacaagttggacaagcttgaattaaaccaatagaacaatttgggtataatctatatctttactatgttcagcctttcatcccgtgaatatagtatgcctctccatttctttagcttttattactttcctcaacattttatagttttcagcatagaggtcctgtacatcttttgttagatttacaccagaaatatttcatttttgttggagtaactgtaaatgatactgtttttcttgtattttcagatattgattattgttacatagaaatgtgaataattttgtttgttgatcttgtatcctatagccttgcagaacttacctattcgttctagaaatttttttgtatattccttgacattttatacattgacaattatgtcacctgaaaatagagacaattctattatttcctttccaatctgtatgccttttatttctttttcttgtctagtgtattaagacatcaggtatgctctttagtaagaatgttgagagtgggcattttttagttcttcttgatcttggaaaaaccattcagtccttcatcattaaatgtgatttaactgaatgatttttttacagattgtctttatcaaatgaaggaactgtctctctcttcctagtttattgagattttatcatgacagctggaagtacacattttaaaacaaaacatagttgtggaagataagagaaagttccaagcatgctggcttgatagtccagccccaagttgggaaaagtaattatccctttctttttccttctatttatggaataaaaaattaagagaaaagaattttcaaggaaattgcattattccttcaaaacaggtttctagtctttaagtattacctacttttcaaaaaaaaatcaccacatcatggcatccctttttcaagttgcccatgctgtaggtgtattaaagacagagctggtctgaggcaacatacagtctgcccatctgtcaccaatccttttctactctgcacactcctggggaagggctaggtcttgttcctgtctattccactggaagaacagttccctaccacgtggagcatttgcaattaaaaggagactgagatatagaggcaggagaccacaccagatggctgggtctccccactcccacccccgccccacatacactcagaagaggctaggcatctaggatctccattgagcatcttgaatatggcttgccataatatcatatacagtcaataaatatttgttaaataaggatgcctcttcaatatattttgtgcaaccatgaagatcaccacaactaatgtgagaaaaaatgtttctgttgaactctagtctttaggcccagtgggatttatgaaaagtgccatctctttagctgaggatgaagaatggaagagaatacggtcattgctgtctccaaccttcaccagcggaaaactcaaggaggtatgaaaataagatgagtcttaattagaaatgtaaagaatgaatctggggacaggtagaaagtaagatcacagtccgtttccaaggggtagtccactgagttcgagcttcctaaaaatggtcttttatctttatgtacagaaaagacatcacaaaattcattacaaaatgtcacttactgctccatgctggagaaagccatatccttctgggacttgagtctgcacatttaactacaggtactgatctgttttgtgcttagatgttccccatcattgcccagtatggagatgtattggtgagaaacttgaggcgggaagcagagaaaggcaagcctgtcaccttgaaagagtaagtaggagcacagccatggggttctgagctgtcatgagcccttccagctgcctgccatggagtcgacagtcgcactgttgggttactccagtgaccagacaaaagcagggcagcgctgcaactccaaagagccacctaagagggagtggctcccatgaggcggcaagtcagcaagggaaaagggccttctctcctgtgcacaggagccaggatttacttatctgttaacttgtcaccataaatattctgggagattaaatacatactttagaaattaaaaaaacatgattgtatcaaagttttgagtgtagtggatatggaactgtgggtaagcaagcatttggtacttgttgccttgcattgggtaagatgggaaagttacaatggggaacttggaacaatttcaatcccttcatggtttttctgagaatatcagcaaactatgaactattaaaccttcccactacttccttttcctccaatctcaaaaaagaaagggtgctagaaatgctatgtgtagagcaagcctattatttgctgtctacaatggtatgtgcttcaattatgcaggaacgacaggtgtaatctgagcctgtcctgttcagacttgggacatgtggtcactcagttttgggttctccaaatcaatgttggagagatctattttttttaaccagaacattcttgattgtcacatcttacaaaaatgactctgctctcagcgcaacttcaggtcagaggagctggggatagtggggttttccagagcattagcagggagtgtagagaataaaggatgatatttctaggaactcagaacagggtgttactgttttgtaaagtgttgaagaggaattggctctgggcatagagtctgtagtcagacaacgccacctttcttgaatccactaggaagagttaattattctactcttgttctgctgaagcacagagcttacatatcttatatcatccacactcaacacatgctactgtagttgtctgataatgggtctctgtcttcctatgactgggctccttgacctcagaggtgagtctaactcagcttggtgtctccatcacccccagcatagggccagctccatcactggcaccagataaccaccttctgagggagtagatggaagatgattcagcagatagttctgaaagtctgtggctctttatgtgtcttgactggatatgtgggtttcttgctgcatgtatagtggaaggacggtaagaggtgctgattttaattttccatatctttctccactcagcatctttggggcctacagcatggatgtgattactggcacatcatttggagtgaacatcgactctctcaacaatccacaagacccctttgtggagagcactaagaagttcctaaaatttggtttcttagatccattatttctctcaataagtatgtgggctattatttctttctctctttttaaaaataactgctttcttgacatataattcacatatcgtataattcatccacttaaaaggtacaattccattgtttttaagataatcaaaaatatgtatgaccattactattgtaaactaaaatgtttttgtcaatctagagccctcacacactttagctgtcaacaccccaccacaaaccccactgccctaagcatccaataatcaactttctgcctctatagatttgcctattctggacacttcatagaaataatatcattgatttttctctgttgttttttattctctatttcatgagtttattttagtctgttattttctttcttttgctggctttaggtttcatttgctcttcttcttttagtgttttgtggtgtaaataattataatcaatttgagatattttcttcttttaaatttagatattacagctataaatttccctctgagcactggtttggctacatcctgtgttttggtacatcatgccttctttttgttcatctcaaaacaatttcttgttgcccttttgatttctgctttgactcactggtcacttaaaactgtattgtttaacttccacaaatgtatgagtttcccaaatttctttcccttattgatttctagttttattccatggaagttgatgtacatatgctgtgttaattctatcttgactatcatttcctgaacagcatgattaagttaagcagcagattatggtctacattaatccaaaaactctagtccaatagataaaggctaagaggtcagggaatttaattctattactttggtcactccaaagactcagaaggtgccattgatctcactgctgtagtggtgtttcctatgtatagacctgcccttgctcagtcgccggcctgaaagaagggcaaacatgataaaaggaatgggttccagttgagaatcatgatgttcttattcttattactggtagagaaaattataattgctccaggtaaagtttgcattttcaatgatttccttttgtttgttttgtttttcccacagtactctttccattccttaccccagtttttgaagcattaaatgtctctctgtttccaaaagataccataaattttttaagtaaatctgtaaacagaatgaagaaaagtcgcctcaacgacaaacaaaaggtaaaatctgatggtggttaaatgacgatgtttaggttttgataaatttagattttatacacatgatagagcatgtatctgtatttttaaaaataaagacagagaacttatgtttagaacaagagaagccatttggtagaaataaagaaggagattggggaaggagatgagaatgagtcagagagatagcatttaaaacttgaaatcaggcacaacaattagtatgtcatgatataaacagtattgagataaaattttaccacttctcttccctttaataaattgtcaaaggataaagtttcctgtttgaaaatatattttactggtattgtgctttcctcatatcacagattggtaaagaatcattttaagtccaagactcttattttacatattctgcaattaaaggtcctatgaggctacctgccgactgctgacatgtagtgtgtggtaaatgtgagtgtttcacagcctggagtgaacaggggtcttctctgagaattgaggttgcaaggctggctaactcagctttgccttcacgagccctagaggccagccgaaggatgtctgcaggtcagggagacaggaccaggtaacccagctgtcactgaagattatatagagtttgagaatgttggaatatttgaaaatgctcccccaaaaaagctgctgatgagttctggaaatgtcaggagattaatctatacggacactgctgaagaaaaaggtagaagaataaaagatccagtacttcttcctgggtaagcagttatgaccagagatggaaccggcaactctttggccagaaagctgtatccaaaagacagagaagatgagaaacagggagggcaaaggcgaaaaagcaattggacatgatagctagatttgtttcaggaaaacatcctgctttccaaggatttagatgaatgtttttgttcactggtgactcaggtaacacgtcttcaagaagccatagggaggttgagggagggaagtcaagaagggaggttgaggactgcacttttgatttacttctgacttcacgagtcactttctgccaaagaaatctctccttttgcttctagcaccgactagatttccttcagctgatgattgactcccagaattcgaaagaaactgagtcccacaaaggtaaccaaggagtgcttctgagggctactggcggggacactaagagggagggccttgttctgaaaatgtgcaggaagtattccaggaagatgagaatttttgccacatagcagaacaacacacatttagatgttataaatggtagctggaggcactttccagaagcccacaggtatagccatgttccaggctgaaagggcaaccctaagcaaacctagaatgcttggaggacagtcagtggtttgtggatcacctacatgagatcaaatgccagttctcagcctcctccagatccaccaagtgagaacctctacttggaaatttatatcaaacataccgatcaggaagcacactatcccagtaagggtgattttaactggcagtacttgaaagtgtgttcgcaaggttaatctactgcaaagttttatttttccctttgaaatgcataagtaactaatgggggacacctctgataccatgtaaatctacttcaatcttcagtcttgtatctactagttttatgacccatggatggttttaaccaaaaccattattactaagacagtggcaaaatgataaccatggtcaatttcaagctaccaagatttggcaaccatctcacaaaatttttgaatatttaacaattggttctagagagcaggactcagcagactccagtataccactttaaacatgtccatgtctacatctacttctgtctgtctatctatctgtcaatcatctatctgcctataatttatcaattaatcatctatctatctcaacaaaacttgctgtgataaagaaaatagtctatcatttcactgtttcatatagaaatcactagacacatatggctattgagtactggacatgtggccaatgccactgaagaacaatttttaagagtatttatttttaattgaataaaatttgaatttaaatagccacatgtggatagtggctaccagattggacagcagagctcccaactttaaaattacagttcaatttcaactcagtataatggggttcaatgtaactgagtaaaataattggatggttgaatttacccacagcagcatacagaaatattcactgataaatcagaactctgtagacctttctcacactcattttatattgtgtttggttgtgagttacatgattgctgcaggcaccatatttatttctgtgctccaggtctctaaaggtcctaatccagtcctgaccaaacagactagtgatggaccatcgtgagcttctctcaggagaaatatcaagagggaggccaacctgtaatcataagaacttctgctattttaatgccattcatcagactacagtcaatcaccatgcttctggctttttgtctatctctgctgtcttgtacatcctgagatagtccattctgagaactgtaccctagatcttgtattgcctgatgcctgtcaaagatgtaatccatgctgcttaagtgaggttgtgcacacaaatcaccatatctcctgcaagtttggattttgattcagtagttcgatggtggggtttgagattctgcatttctaataagctcccagatgtggctggtgctgctggtccatgaaacacactttgagtagcaagaggtgatctgtagctcagtattggtcctttaagttccctcaaacatatatagagaaaaggtcctaaatattgcaaattctctcaaagtttgtcaagctatattggaattctctcaaagtctgtcaagctctattgtagaaaatcaaatttttattgggaaaaagcctaccccatatttacttacagataaagtacttttaggatcattcaaggcacacacccataacactgagtatgtaagacagaaatgctctctctggaaattacagcagtgctggtgctgggatgccatgatgaggagtgtgtggcccacaatcatgtagaccttgggaaaacctggattaaaatgattttgcgtcatcctggccctgtataagatacatatcagaatgaaaaccactcccagtgtgactttgaattgcttttccattttttcttcttgggattagagagcttcacttagatttcatctaagctgtgatgttgtacgttgacctgatttacctaaaatgtctttcctctcctttcagctctgtctgatctggagctcgcagcccagtcaataatcttcatttttgctggctatgaaaccaccagcagtgttctttccttcactttatatgaactggccactcaccctgatgtccagcagaaactgcaaaaggagattgatgcagttttgcccaataaggtgaggggatgacccctggagatgaagggaagaggtgaagccttagcaaaaatgcctcctcaccactccccaggagaatttttataaaaagcataatcactgattccttcactgacataatgtaggaagcctctgaggagaaaaacaaagggagaaacatagagaacggttgctactggcagaagcataagatctttgtacaatattgctggccctggttcacctgtttactgttatcacaataatgctaagtaaaaaaaaaaaaaaaaaaaaaaaaaaaaaaaggagtgtggcgagaagatggccaaacaggaacagctccagtctacagctcccagcgtgagcaacacagaagacgaatgatttctgcatttccaactgaggtaccgggtgcatctcaatggggattgttggagagtgggtgcaggacagtgggtgcagtgcacccagcctgagccaaagcagggcgaggcatcacctcacctgggaagtgcaaggggtcagggaattccctttcctaggggtgacggacagcacctggaaaatcaggtcactcccaccctaatactgcgcttttctgatggtcttagcaaacggcacaccaggagattatatcccgcgcatggctcggagggtcctacgcccatggagcctcgctcattgctagcacagcagtctgagatcgaactgcaaggcagcagcaaggctgggggaggggcgcccgccattgctaaggcttgagtaggtaaacaaagctgccaggaagctcaaactgggtgaagcccaccgcagctcaaggaggtctgcctgcctctgtagactccacctctaggggcagagcatagccaaccaaaaggcagcagaaacctctgcagacttaaatgtccctgtctgacagctttgaagagagtagtggttctcccagcacacagctggagatctgagaacagacagactgcctcctcaagtgggtccctgacccccgagcagcctaactgggaggcaccccccagtaggggcagactgacacctcacacggccgggtactcctctgagacaaaacttccagaggaatgatcaggcagcagcatttgcgggtcaccaataccgctgttctgcagcctccactcctgatacccaggcaaacagggtctggagtggacctccggcaaactccaacagacctgcagctgaggatcctgactgtcagaaggaaaactaacaaacagaaaggacatccacaccaaaacccatctgtacatcaccatcatcaaagatcaaaggtagataaaaacacaaagatgggggaaaaacagcagaaaaactgaaaaatctaaaaatcagagcacctctcctcctccaaaggaacgcagctccgcaccagcaacggaaagctggatggagaatgactttgacgagttgagagaagaaggcttcagacgatcaaactactccgagctaaaggaggaagttcgaacccatggcaaagaagttaaaaaccttgaaaaaagattagacaaatggctaactagaataatcaatgcagagaagtccttaaaggacctgatggagctgaagaccatggcacgagaactacgtgatgaatgcacaagcctcagtagccaattcaatcaactggaagaaagggtatcagtgatggaagatcaaatgaatgaaatgaagaaagaagagaagtttagaagaaaaagaataaaaagaaaggaacaaagcctccaagaaatatgggactatgtgaaaagaccaaatctacgtctgattggtgtacctgaaagtgacggggagaatagaacgaagttggaaaacactctgcaggatattatccaggagaacttccccaatctagcaaggcaggccaacattcaaattcaggaaatacagagaacgccacaaagatactcctcgagaagagcaactccaagacacataattgtcagattcaccaaagttgaaatgaaggaaaaaatgttaagggcagccagagagaaaggtcgggttacccacaaacacaaacccatcagactaacagtggatctctcggcagaaactctacaagccagtagagagtgggggccaatattcaacattcttaaagaaaagaattttcaacccagaatttcatttccagccaaactaagcttcataagtgaaggagaaataaaatactttacagacaagcaaatgctgagagattttgtcaccaccaggcctgccctaaaagagctcttgaaggaagcactaaacatggaaaggaacaactggtaccagccactgcaaaaacatgccaaattgtaaagaccatcgaggctaaggagaaactgcatcaactaacgagcaaaataatcagctaacatcataatgacaggatcaaattcacatataaaaatattaaccttaaatgtaaacgggctaaatgctccaattaaaagacacagactggcaaactggatagagtcaagacccatcggtgtgctgtattcaggaaacccatctcacgtgcaaagtaacacataggctcaaaataaagggatggaggaagatctaccaagcaaatggacaacaaaaaaaggcaggggttgcaatcctactctctgataaaacaggctttaaaccaacaaagatcaaaagagacaaagaaggccattacataatggtaaagggatcaattcaacaagaagagctaactatcctaaatatatatgcacccaatacaggagcacccagattcatgaagcaagtctttagagacttacaaagagagttagactcccacacaataataatggaagactttaacaccacactgtcaacactagacagatcaacaggacagaaagttaagaaggatatccaggaattgaactcagctctgcacaaagtggacataatagacatctacagaactctccaccccaaatcaacagaatatacattcttttcagcaccacaccacacctattccaaaattaaccacatagttggaagtaaagcactcctcagcaaatgtaaaagaacagacattataacaaactgtctctcagaccacagtgcaatcaaactagaactcaggattcagaaactcactcaaaaccgctcaactacatggaaactgaacaacctgctcctgaatgactactgggtacataacgaaatgaaggcagaaataaagatgttctttgaaaccaacaagaacaaagacacaacataccagaatctctgggccacattcaaagcaatgtgtagagggaaatttatagcactaaatgcctacaagagaaagcaggaaagatctaacattgacaccctaacatcacaatgaaaagaactagagaagcaggagcaaacacattcaaaagatagcagaaggcaagaaataactaagatcagagcagaactgaaggaaacagagacacaaaaaaacccttcaaaaaaatcaatgaatccaggagctggttttttgaaaagatcaacaaaattgatagaatgctagcaagactaataaagaagaaaagagagaagaatcaaatagatgcaataaaaatgataaaggggatatcaccacccatcccacagaaatacaaactaccatcagagaatactataaacacctctatgcaaataaactagaaaatctagaagaaatggataaattcctcgacacatacactctcccaagactaaaccaggaagaagttgaaactctgaatagaccaataacaggttctgaaattgaggcaataattaatagcttaccaaccaaaaaaagtccaggaccagatggattcaccgccgaattctaccagaggtacaaggaggacctggtaccattctttctgaaactattccaatcaatagaaaaagagggaatcctccctaactcattttatgaggccagcatcatcctgataccaaagcctggcagagacacaaccaaaaaagagaattttagaccaatatccctgatgaacagtgatacaaaaatcctcaataaaatactggcaaaccgaatccagcagcacatcaaaaagcttatccaccatgatcaagtgggcttcatccctgggatgcaaggctggttcaacatacgcaaatcaataaacataatccagcatataaacagaaccaacgacaaaacccacatgattatctcaatagatgcagaaaaggcctttaacaaaattcaacagcccttcatgctaaaaactctgaataaattaggtattgatggaacctatctcaaaataataagagcaaatttatgacaaacccacagccaatatcatactgaatggacaaaaactggaatcattccctttgaaaactggcacaagacagggatgccctctctcaccactcctattcaacatagtgttggaagttctggccagggcaatcaggcaagagaaagaaataaagggtattcaattaggaaaagaggaagtcaaattgtccctgtttgcagatgacatgattgtatatctagaaaaccccatcgtctcagcccaaaatctccttaagctgataaacaacttcagcaaagtatcaggatacaaaatcaatgtgcaaaaatcacaaatattcttatacaccaataacagacaaacagagagccaaatcatgagtgaactcccattcacaattgcttcaaagacaataaaatacctaggaattcaacttacaagggatgtgaaggacctcttcaaggagaattacaaaccactgctcaatgaaataaaagaagatacaaacaaatggaacaacattccatgctcatgggtaggaagaatcaatatcatgaaaatggccatactgcccaaggtaatttatagattcagtgccatcgccatcaagctaccaatgactttcttcacagaactggaaaaaactactttaaagttcatatggaaccaaaaaagagcccgcattgccaagtcaatcctaagccaaaagaacaaagccggaggcatcatgctacctgacttcaaactatactacaaggctacagtaaccaaaacagcatggtactggtaccaaaacagagatattgatcaatggagcagaacagagccctgagaaagaatgccacatatctacaaccatctgatctttgacaaacctgacaaaaacaagcagtggggaaaggattccctatttaataaatggtgctgggaaaactggctagccatatatagaaagctgaaactggatcccttccttacaccttatacaaaaattaattcaagatggattaaagacttacatgttagacctaaaaccataaaaaccctagaagaaaacctaggcaatatcattcaatacagaggcatgggcaaggacttcatgtctaaaacaccaaaagcaatggcaacaaaagccaaaattgacaaatgggatctaatgaaactaaagagcttctgcacagcaaaagaaactaccatcagagtgaacaggcaaccgacagaatgggagaaaatttttgcaacctactcatctgacaaagggctaatatccagaatctacaatgatctcaaacaaatttacaagaaaaaaacacaaccccatcaacaagtgggggaaggatatgaacagacacttctcaaaagacatttatgcagccaatagacacatgaaaaaatgttcatcatcactggccatcaaagaaatgcaaatcaaaaccacaatgagataccatctcacgccagttagaatggcgatcattaaaaagtcaggaaacaacaggtgctggagaggatgtggagaaaacaggaacacttttacactgttggtgggactgtaaactagttcaaccattgtggaagtcagtgtggtgattcctcagggatctagaactagaaataccatttgacccagccatcccattactgggtatatacccaaaggattataaatcatcctgctataaacacacatgcacacttatgtttattgcagcactattcacaatagcaaagacttggaaccaacccaaatgtccaataatgatagactggattaagaaaatgtggcacatatacaccatggaatgctatgcagccataaaaaatgatgagttcatgtcctttgtagagacatggatgaagctggaaaccatcattctcagcaaactatggcaaggacaaaaaaccaaacactgtatgttctcactcgtaggtgggaattgaacaatgagaacacatggacacaggaaggggaatatcacacactggggcctgttttggggtgggaggagtggggagggatagcattaggagatataccgaatgttaaatgacgagttaatgggtgcagcacaccaacatggcataggtatacatatgtaacaaacctgcacgttgtgtacatgtaccctaaaacttaaagtataaaaaaaaaaattcaaaaacctcagtggcatctaatgagaagcatttattgctcacaagactggatagtgagttctgctgatactgactggactcactctggtctggctatggtctgaggtagcctggccctgggggcgcgatggaggctgactcagctctccccacacctgtctcatgttccagtcaggtagccactggccaagaagccaagctaggaaccagggtatctgactcctgagctaaactctaaccctctacaatactgcctcccaaatataacaccaagtgctaggtacatatcatccacagttttcagacttctgcccaaactgggattctttttagtgtgaagagacctggcctgtggggctgaccctggtgtggctgtgaggcagacacaaagggacatttacatccagtcctgaagattacagtccagccctgaagcaacaactaggaaactattccaaaaggaggggatggggctgagtgtggggttctattctcttcataactttaactagaactcaaattgtgtaccttggtagcatccaatcataaatttattttgtcgtatttgtgatagaaaggaacaagtttatccacaaatttatttatttatttatttatttatttatttatttgagacagggtctgactctacgacccaagctggagggcagtggtgcaatctcagctcactgcaaactctgcctcccaggctcaagccatcctcccgcctctgtctcctgagtagctggaactacaggcacacgccaccacacccagctagtttttgtattttttgtagagatgggttttcaccatgtttcccaagctggtctcaaactcctcaaaagagttaccaagcaggactctgcaaccaataatccttgtgtgaagaggatatttgctcttttccctgtttttctttcttggtacagatgtgtgacctctttttgaaaggtgatagtgactttggtgtattttatttggtggtaatggtcatagccccattaatcacatttcttcccatgagaaagaaaaaccactacatggtcatgctaaggatttcagtccctggggtgaggatggtcttgaatatctcctacattcataactcctccacacatctcagtaggtcactgagcacatcaatggacatgccagttattaaaatacttcacgaatactatgatcatttaccagtatgagttattctctggagcttctaatacttcaatagtactgcatggactcagttgagagttaattcaaaatctcagattatccaattctgtttctttccttccaggcaccacctacctatgatgccgtggtacagatggagtaccttgacatggtggtgaatgaaacactcagattattcccagttgctattagacttgagaggacttgcaagaaagatgttgaaatcaatggggtattcattcccaaagggtcaatggtggtgattccaacttatgctcttcaccatgacccaaagtactggacagagcctgaggagttccgccctgaaaggtacaagtctccagggaaatggagctcaccctgacccaggctggttcaagcatattctgcctctcttaatctacatgacaatcgtgtggttgtacaatcatttgcttgtaagtctttttatcacaaaaaagtgataattatcaaactttacaaaccacagactagaaaaaacgaaactacatccatccacagtcccagcacaagacaaagataatcaattatgtccctgtgggcatttttctacgcctatatagatttttaaaaattagaatggtatcactttttatttggtttgaattgctgcttacttgatttaacaggaaactatccactgacctatattactataaatatacatatatatgtatatatataaatatatatatatgtatatattgcatatgccataaaccatttaaccatgatgttatttcaggtgtataggctttttattcctttctgttttttctatgctgtgccctttagctctctgaatttaacagaaactttaaaacatgcttccacattccatttgctttcaacgttacttgctatttcctctgtagtaattataagagtgcaggctgaggtcctgagaagtcctcatccctaatggtttaagccacttcactgaagacacaagacagcacaggtcctcctggtcctatctgtggctgcagtcctgtgccagctcccttatactctcagtagacatctcacacactcctccttggaggtgtcttgagcatgctcttctgggaattcagggacaaggtcaggccttaggcacagttcgcactctggatatagttggtgttttcccattactgtattattaagcaaaatttagaatgaaatttttagggtactggctggtgattcaggatgcttgggatctagactttcattagcccctacctgcaagtttgctgatgggaggaaccttgtcttgttggtcatggtgtccctagtgctagcatggagtctgcacataatacttgttcacagagtaagtcagagctgaccaagttctctgttttctggagtagaggacttctatgtttcctgcaagctcagcacttccacctcctgtggctgcactaatacgaaatcagagaccactcgctgtacttcactttgaatcactcagtcaccaaaaagatagtgcttgccatgtgtcaggaacttggctaggcagggagaaattcatatgatttatataaatccataaatccatatgatttacataaatccataaattcatgtgatatatacgtatatgtgtgtgtatatatatattagagaatgtttgacatatacacaagtacatgttaccgacaccagcctatagaatagttttcgtgcatctccatatatctatcactggttccaacagccatcaatccatgttagctgccccatccaaatgccaccatcaccctcctcctgactatcatgttattttgaagcaatagcctgtaaatatttcagaatgctctccaaaatataaagactcctgtaaaaacatatgacaacaatgccattattactttctttgaatcaacattttttccttaatataatcaaatatttagaaatcaaatttgaataaaacatgggtcaatcttcaaagaatttatagcttaatggaacagatcaaggaaagcagggatgacactacagtagggtagcatcatatgcccatgtaacttatgtgacttaaactatcctgtaagggtgtgggggagaaagagaggaagagatggagagaagaaaaaggaagagaaggaggaggagaaggaggcagaggagaaggtggacggggaaggtagagaggaggaggaggggaattagaaaaaaagagatgacaggagaaggaaagggaaaaataacaacttgaaatagcacaagacgttttctccttctcctttctcaatgagcatgtgaccaacacaagtgtgagttgaggcaggaatccacttttccatccatcagtcttatcatttatgtgccttttatagtgtgaacacatcaccaccctgaatataattttagtgtttagagataaatattatttgcaacaatattcatctcatctcaagaaacgctcctatagggtatggagaatttaaaggacctgtaggttatgatgattataacgaaataaccaaagcaggatttcaatgaccagcccacaaaagtatcctgtgtactactggttgggaggtggaggggggttgttcttaagtaagaacccctaacatgtaactctgtggtttttatgtttcattaactatttaatctaccaatatggaactaggttcagtaagaagaaggacagcatagatccttacatatacacaccctttggaactggacccagaaactgcattggcatgaggtttgctctcatgaacatgaaacttgctctaatcagagtccttcagaacttctccttcaaaccttgtaaagaaacacaggtcagtacactttctgtatgttttattaagaatttttttaactgaagggtatatattttttaaaagaatatgcatgtttatcttttaataattcattctatgggccaaagaacctacttggatccatctttgatcattaaggatgcttcagttctggacttcaaaacctgtagcattaagaacatcatgtaaagtccacacagattagcatgacatgattatgtgtagtctctttgaacctgagtaagtttaaattcagtttcaagtcaattggaaagaagtgttttgcacaatcatgaagtgcaatgattacctggctgtgacttaaatggtgttctccatcaccagaacctgcagaagctctctcatgacagtggttctcaaccactagctgtatattggaatcaccagggagcttcaaaaattcatgatgcctgtgacatctcagaaattctaaactaattaacccagagcgtgactaggttctgtcatgctgtcgggtgaacccctgattagttctcacgtgaagccaaggtggagaatgactaatttcaggcatttctggtggatatgaaggactaccatagagcagggctatccttactccttgaccttatgttccaggtgatacatttaaagaaagatttagaatcttttctctgaagaagttaaagaacagatgtcattgattcatattaagcaatagcctataagtcttatttccaggaccggtgtatttaatatgcaactctaccccttaagtacactttgtgcttgggagaggaggaggatggagatggttgccatcttatctatggcttcagggcagctgtgtagctttcctatgtgtgtattcaggcagggggctcagccctgagagaaagtgggcctctggcacacctgggacagggaagatattccctggcaagctctcaggcatctcaggctggcacttctttgtatccatggcaatttgctttcccctcactgaactgagatcagaatgttactctgttggtggctcccccaacagtgaaggggtgactcagtgacaatagtgctagaagtatgagtcaaaacactgtacaacttgagaaattccccgtttgcactacgcttggaagccaagaggagatgttaaaaagaaaagaataattctttctgaagacatttcccatcattgcacttgatgggttcaactgggaagggttactagactctggaagttgaaaactgcccacataattaaactgtacaacagctactcaggattaccttgcaagttttaacctataaaaatttaactttatatagcacttccaaaatagtttgccataatacctactaatctggatttaatttttaaaactcatccttttaacttaagatttaaataaaaaaaaaaaaacacgagtccacaagaatttgtctcaggcctggcacagagtcagtgctccataaatattttgttaaacgatggatggtgagtgcttttactatccagtatttacccagcttatagattaagtatgaagagttcaagatacatggtgttaagagtcgtttttatatgcttgcaaagcatttttgtcatattttttctactttgcttccatcttttcttctttcacttcatttattaattctccatatgcttgtttaactattgtagatccccttgaaattagacacgcaaggacttcttcaaccagaaaaacccattgttctaaaggtggattcaagagatggaaccctaagtggagaatgagttattctaaggatttctactttggtcttcaagaaagctgtgccccagaacaccagagatttcaacttagtcaataaaaccttgaaataaagatgggcttaatctaatgta

SEQ ID NO: 138 - DNA, 30162 bp, Homo sapiens
tcactgctgtgcagggcaggaaagctccacacacacagcccagcaaacagcagcacgctgctgaaaaaaagactcagaggagagagataaggaaggaaagtagtgatggatctcatcccaaacttggccgtggaaacctggcttctcctggctgtcagcctgatactcctctatctgtgagtaactgttcaggctcctcttctctgtttccttggacttggggtgctaatcaggcctctctttcccttatctgttttgaatagcaaaaaggatgttcaggctggccgtggtggctcacacctgtcatcccagaactttgggatgctgagcaggtggactgcctgaggtcaggagttcaagaccagcctggctaatatggtgaaaccccatctctactaaaattacaaaaattagctgggcatggtagtgcataactgtagtcccagctacttgggtggctgaggcaggagaattgcttgaacctgggaggcggaggttgcagtgaactgagatcatgccactgcactccagcctgggtaacagagtgagattccatctcaaaaaaaaaaaaagagaaaaaaaagaaaaaaaaagattttcaaggagaagtagcttaagtgttggatgctacaaacatatagaggttatgatggatgttttgcagatctataaaggaataaataagcatctcccccattcatctttagtggaaagaagggtttagggacagcattgattgaggataatctaatagacaatggtttgtacccagcttaccaaaccagaatttggattttacatttttccctttaagttgcaggagaagagggtgaatcttctcaccagtgagatcctggcatcctagagcaggtggagagaagagtcactccctactgtgtgtactggaggcttcccgcctgtcacattttacttctaactcaatttcacagttattaagagtaaggaatcatggtcacatggaaacagaaaatacaaacctcgttttaattctttcacagaaaagttagcaattcagtgagttgtggtaacatagtttccatctactggcaatttaacatgaattggtgtggcttaaattcatcctttttaaagccagatttttttggagatagactatttccagcatgttccttctgagtgataaaagagggctattagttcagtatttgtgacaataaatgtgtataagataacctcacctttccagaataatgtcaggaatatgagtctaatgtacaaatatatatctctaggacaagactgcatatgtctttttaaaaatactttcccaagagtttattttaatacccccatttcaaatacacctgcttagcaggttatcctaaactctcagggctagaaagtaagcaagactgtgagccagtgatgatagcaaaagcatccaggtaggatcaagatgaagtgagaaaatattccttacccctcagggtagaactccaaatagatattcatgggtcctggccccctagtggaggtcacttgaaggacaaacatgttggcatctcatctgcttgaagcctggacacaagggcaccatcagtgtcactctgtgtgtggctggccatgttgtggggctgtcactacagattctggcagtcaggcagacaataccttagccttagacgatgccggtacagcccaggattcagaagctatagtgtagaccatgcccttcttaggcctatacaattacatgcaatagatgatggatttttctgttagcctcttcattgtaacaaaaagcagcattactctaccaaacagaggggagctggaaagaaactaaacagtttgccaagcacagcctctgccttgacgtggaatcatgtgaatctagacactcacctagatctttcctcgggggccaatgctgctcacacattaactcaatagtttgtcctggcctgagagatcatgtaacatgtagaaagtttagaagcagagattagtgccattgattttccatggctgtgacaacaaaggaaggaacaggagtgggaaaacccaaggccaccctggttgtggtagatggtgcacacacttccactaactattctggggcaaggatccaaatgcactattgggcctggctatgctgtctctgctgggttctccaaacacgagcctccatgctgtttcttagttgtattttaccacatattatcagagtcactggatttgtacagaatgtttggaacctatactgccttaatggctaccctttaaagaagagaaaacaaggtcttaattcaactatctggaacattttatggttacttatgtggaatactccatcttttgctatcaacaggaaggtacctggccattagaaggtgcctgcctttcagctgaaagcacatatgaggcatatggatccatttatacacaccgtacttttgaaccacattttcctaatttgcctgtctggggccaagcttgtgggactagcagattcatggttgaattgatggctggctacctcttccatcaacttttctgcttcatccagtcttccacccctcagtaacctcaaactgggaaggtcttcagatatccagaatccccagttggggaagtccatacatggcccatcaaagatgggttgcaagcaggcctgctatagggagcagcagccttgatgggttttcctacagagacagttgatgtgcagacgcaataaactgactgctttgtaattgatcaccttgaaaaaaaatgagcatgtctggctgtattagtcttttcttccattgctataaaaaaaaatctcagggtgggtaatttagaaaggaaagagatttaattggctcatggttctgcaggctctacaggaagcatagcgacttctgccgctagggtgccctcaggaaatttacaatcatggcagaaggtgaaaaagaagcaggcagatcttacatgactggagcagaagcaagagagggtggggaggaggtgccacacacttataaaccaccagatctcataaaaactcattgtcaagaggacagcacccaagggggatggtgtgaaaccatgagaaactgcctctaagatacaaccaccatctatcaggccccacttccagaattggggattacatttcaacatgagatttgggtaggggcacagattcagatcatatcactggcactgtgcttatcaggtggatatcaccagttggaaggctagattccacaagaggaggaatgtccttgttcttagttgtgattcttctgcacagtgtcattcaggaaaatatgagtcaatcatcctccccaatagctcaaatcaatcagatcctctgaccacagagactgaggtgtagctaaaaggtgctcgcacttctacgaggccaatggaagcctggagcacagttgtcaatctgtagaaataaggactctgtgactcctccaagacctctctgtgaatgacagtttaagaagggccagatcctaaaacagggtcagagcttagagtgaagggaaagcttaaaagcctctgagcaaattctaaagacagggtcaccataggctctcagtgaccccctgtgactgagtggatgcagtgatgcaaaatctcatcatcactgcagaagacaaaagaaaaattgtcactctttctacctaggatgagaatcccaaaatcagggaagagtccacttactaaaaagacatgagggaatgaagtgcctggaagaattcgttcctgaacctctcaggatcattcacatttgagaacatttatcaaatattcatcccagactggggccatgaagacttcagctgcttttagctaatcattgtaactttttggtgtctcatggtggaagcatgaaaggacctgatgaacaaatataatcattgccgtcagagttactgttattttttattgccttaatgttacctcctttgcctgatcattccagttcctcagtcagtgactcaccagcccctatatctataaagtcacaatccctgagacctgatttttgtttcactttgtagatatggaacccgtacacatggactttttaagaagcttggaattccagggcccacacctctgccttttttgggaaatgctttgtccttccgtaaggtgagtgtttttgagcttcctcttttgcttcttatgattgcaaagagcaacttagttccatcagtaaaaatgcttctcctcaagaggaaggtctgagattttatactttcagaaatagcgtgtaggcatcacccagagcgtggcaaagtttaccctggggctctcttgctaactctcaggaacctcaagtttgcctcagttggacagcccaaatgtcaagtagatccagcaatctgatgttcacaacttgatgtgcagactttgtgagcaccataaagagcatttcctttttgctccaggcaggttcccaggaaggtacagccatacttagttagtattaaaagtaggaacaggagcccctgattgtggcttgttatctgtggacatgagagtaaaactttcctctctgtagcaagagctcatgaataggcttttttcccttcctcctgcacagcttggaaactcagtttattagggagatcaagtatttaccattgggtcatttgcacctgcttgaagcctcttcaaaaaatgccaaattttgttggggaatttccatggctttaacccaggtcttactccccatgacatctgttgccactttgagacacagaacaaaagtgttctgctttacttcttttcctttgaaggctgcgtcttgtgggtgagtctgagcagggagtggatgtaactgagatgagatagtggttgtctattaacctcagatatttaagcacaatatgaattcatgggtttattttttacacaaaggcagaatcacatgcaaaatcactagaaaggggatgatttgacaaaattattgaatatttaatttcactaaatagaatgtcatatgtgcctcatggactggggactttggtcgagcctttgtgcctaaccttatctgatgctgtgttcagggcctggtccctggatggaaaattatgagcttatttccacagggccagcagcagcaggagtcagctctctggcttagacaatctgacctgcatacctgaggcttgtttctcagattctagttctcctaagtgagggctttgttgtctaattactgcccaggaatttcatattttttccctctgcaaaagcaataatttccctactttcacatgcgtccgtgtgaggagaccaccaaacaggctttgtgtgagcaataaatgtttttaatcacttgggtgcaggccaactgagtctgaaaaaggagtcagcaaggggagataggggtggggcagttttataggagtggggtaagcagtggaaagttacagttaaaggtggttatccattgtcagcagtggagggggccacaaggtgcatggtggggagatcataagactcattgtgcagagaagaatgtcaccaggttgattgatcaatcagttgggacagggcaggaacaagtcataatggaatgtcgtaagattgctcaatcagttaagacaggagctggctgtttcatttcttttgcagttttcagttgcctcaggccatctggatgtacacgtgcaggcttgggctcagaggcctgacattcctgtctttttatattaagaaaaataaaacaaaatagtggcaaagtgttggggcagcaaaaatttttggggggtggtatggagagataatggatgatgtttctcagggctgcttcaagcgggattatgggccatgtggacaccttaaagaaaattttataatgagttacaaggaataggaatttaggctgtggggagatcttggggcagaggatggtaccatggacttgttaaaagtaatatttgttgtatagaataattggtgatagtctgaatgtgtttttatattaattgagaaaccaattgaagacacaagtcccgaataacagaaggagaaaaacaggtaccagaggactaagaatagggaggagctaagacacccagttagaaagtgtccaggtgggtccaaaataagtatttgcctggctggtgagtttttggtctttatctttaagcttttttatattgtcatataccaggccagattggtttagataaaaacaacattcttcatttaaaaatatagagtactcctttttcagcagtgagtaggtcaaggcctcagcgatgttggaggacgactagggctaagaagtcaacctgggtctgaaggactgataaagtttgtgatgtatctgtaatgctagcagaaaagtcattagaaaggctacagaaagttgtgacagaagttgaaatacctgctattccagctccaagggcaatagtggaagcagaaagtcctaaccctacaagtagagggattagaggaataactcatttttgtctggttggtgtcatgagggggacaggaagttgttcagtcccatttgcaaattgaattttttcaatttgggaataagaaatactagtgtacatgtacctgtccaattagcagatagacatatgtacgtggtggagccacagaggaagcagaggccttgtgtgaggcaaaactggaaatgcaaagtgaaaagatgagagggagtgccaaaagaggtgtcttgcacccagactcttagggatttagtgagggcatcagcccttagtggtcataatggggattgatggggcaactgggtatgagaaagagcatagtgtctacaaccaaactttcattgctattcatggggttcggtataagtaaacaagaagggggaatgggaggagagtctgaagaacaaggggaaggtagccaagaatggagtgaaatacagggcaaatgtcttaagggaaatgagaagttctaggagggggctagttgcttgtaacctacatggaagaggtcatgaaatgacaacagaatagaatgggcctgtgagactggaaggagatatttttcttggtctaagaaccatcttccttgagtggggagggattgatagatggaaacttcagtgggagagtaaataggagtgactgatgagaaggagaaaaactggccatgagggacagaagtaggaatactggttgcttctttagctgtcttatcagcataattgttgccttgagcaatggggtctgaggccctttgatggcctttgcagtgaatgactccagctttttttggaagtaaagtggccttgagaagaatttttattaaagaggcattaatgatggaggacacttgcatagtgaagaaacttctttcagcccatattacagcatggtggtgcaggatatggacagcatttagagtcagtataaatattgatgtgtagtccctttgcaagagtgaggccccaagttaaggcaatgagtttggcttgctgagagatagtggaggggggcagagcagtagcctcaatgatagatgtggaagataatatagcacagcctgcctttgctggtgagtggtgattaggcctggtggaactgccatcaataaactaactgtgattcaggtgaaaaacaggaaagaaggaaatatggggaaatagagtgaatgtcagatggatcagagagatacagtcatggggataaggtgtggtatcaggaataatgtgggaggccagactgaagcccaggccaggtacaatggtaattgtgggagactcaacagagagtgggtattgctaaaggagctggggaacagaaagtatatgcatcaggtgtgaggaaggaaatatattttggaagttatgagaactgtatggagtgagttgagcatagtttgtgattttgagggcttctaaaagtattagggtggtggcagccactgcacagagacatgatgaccagcctaaaacagtaaggtcaagttgtttggacaaaaaggctacagagcacggtcccagtccttgtgtaagaattccagctgcacagccctgcactttggctgtgtgtaatgaaaagagttgggatgagtcaggaagagctagtatgggaacagcctctagagctgtcttcaaggaatggaaagaggagtgaggaaaggatttaggacttatggggtcagctaggtttccctttgtgagtttatataatggttttgttaggatggcaaaaccaggtatccaaaggcaaaagtatccaaccatgcccaggaaggaaaggagttgttttgtagaaggggttggggtttcagagatcagccagacatgatcagcagggagaccccatgtgttttcatgaagaattatgctgaggtacgtaacggatggagaagaaatttgagctttggagggggatacccgatatcctttggagagtaaatgttgaaggagcaggagggtatcttgttgaaaagactcaaaggagggactacagagtagaaggtcatcaatatattgaataatgtgggaagcagagggatgggaagaaagtaaatcatgagagagagcttggctgaagtaatgagggctgtcccagaagccttgtggcagtacagcccaggtaagctgctgggactgatgggtgtcagggtcagtttaggtaaaagcaaagagaggctgggatgtgtggtgcaggggaatagtgaaaaaagcatctttaagatcaagaatggaatagtgagttgtggagggagatattgagaacaaaagagtgtacgggttgggcaccacagggtggataggaaaacaattttgttgataaggcgcagatcctgaacaaacctgtaagacttgtctggtttttagacaggtaagatgggggaattataaggagagtttgtaggctttagaagcccatgctgtagcaggtgagtgataacaggcttcaatctccttaaagcctcttgtgggatgggatactggcgttaagctgggtaagggtgattaggctttaatgggatagtaatgggcatgtgatcagttgccagggagggagtagaggtgtcccatacctgtgggttaaggtggggggatacaagaggaagacacgaaggaggctttgggttgggaagaaggatggcaatgagatgtagctgtagtccaggaatagtcagagaagcagataatttggttaaaatatctcagcctaataagggaactggcaggtggggataactaaaaaggagtgcataaaagaatgttgcccaatttggcaccaaagttggggagttttaagaggtttagaaacctggccgtcaatacccacaacagttatgggggcaagggaagcaggcccttgaaaagaaggtagtgtggagtgggtatcccccctatcgattacacaggggatggacttaccctctgctgtaagagttacctgaagtttggcatccgtgattctccggggggcttccgaggtgatcgggtagcatcagtcttcagccactaagccaaggagatctgggaaggagtcagccaagaaacattgggtttgagctccaggaactttaggagcagtggcgatgtgagtcagacagtccaacctctaattggagcccacacagacagggcacggcttaggaggaatcccaggctgtgggccttctgaggcccagtggccaggcttttggcatttgaagcaaggtccatgaggaggttttgaaggagcccctgggagctgtggcttggatgttctgaaggttttgtatgctggagacatggtcttgggttgtcttacactggaggcaagtagctataattcagagatgcattgtcacttggccgcctcttctctattatgatacaccttgaaggtgaggctatttaagtcctgttgtggggtttgaggcctggaatccaatttttggagattttttctaatgtcaggagaggattgggtcataaaatgcatattaaggataaggcggccttctggcccctctgggtccagggctgtgaagcatctaatggtaggtgctaagtgggccatgaactgggctgggttttcatctttaccttgggtagtttcctttagcttgtcataattaacagccttgtatgctgcttttttgaaccccttgactaggcaggagaccatgtaatctcacctagctatacctggggagtccatcttgtactgccaatggggatgctcttggggaactgccctgatgccttcttgaaggtctggctcatggcactggtgggtgtcagtgtgagattgggctagggtatcaactctttcctgctcatctggggagaggggggaggtcaggatgacatttcagtcactccaggttaaatcgcaggactgagttaaatattggaattcctgtatatatttagtggggtctgatgaaaaagagcctaaacgctgactgatctgggagaggtcgatagagaaaaaggcacatgtaccttgactatgccttcagctccagccacctgactaagagaaaattgttgggcaggtggaggagggctagtctcggaatgaaactgtaaggtggagtgggtgtgaggaggggaggtgatacttctattatagggtgggggagcagaggatgaggaagaattgggacctggcttggcctggtgaggagcagcctggtggggaggggagaggtcagatgggttcatagaaaaggaggattcaaaggactcagagcttagggtggagactgaagaaagagacaggagagaaagaagaaagatttgggatgagtcacactgggagcagagactagggagagactgatgtataaaagaatgcctggatgtcaggcacctcagaccatttgcccatttttcaacaaaaatcatccaggtcttataagatcgagaaatcaaaagtgtcattttctggctatttggaaccattgtccagtttgtattgaggccaagcggtattgcagaagaaaataaggcatttaggttttaggtcaggtgttagtcaaagggggttttaggttttgaagaacacaggctaagggagaagaagagggagtggaggctggaaggttgcccatagtgaagggggcaagcccagagaaaagagaaggtagagacatggagagaggggagatggtacttgccacccagggaaggtggtgcttgccacccagggaaggtggtacttgccacccagggaaggtgatacttgtgacccaggggaggtggtacttgtgccaaggtgaatgatcaaggcaggcatccccacagtgatcagatacctctgaaatgtgggtgaataaccaggcaggtgtcctggcagtgatttagacaccaagggaagactgttcccgagtccatgactggcaccagagttttgagttcatggataaaacgtatctcctccgtctctaccagaaagggaaagaaactgaaattaaggaagggagagattgaagggtggagggatagcaagagaggttggagaagagaataaaaagaggccgcttacccgatttaaaattggtgagatgaccttgggctggctggtctgaggacccaagaggtggatctccccatggagtgagggcgaggacaggggatgggactcccgaaggagtccccctgtcccaggtctttggcaccaaatgtcatttgcgtccatgtgaagagaccaccaaacagtctttgtgtgagcaataaagctttttaatcacctgggtgcaggctgactgagtccgaaaaggagtctgcaaagggagataggggtgggtcagttttataggactggggtaagcagtggaaagttgcagttaaaggaagttatctattgtcagcagaggagggggtcacaaggtgcatggtagggagatcataagactcattgtccagaagaagaatgtcacgaggtcgatcaatcgatcagttggggcagggcagtaacaagtcataatggaacgttgtaaggttggtcaatcagttaagacaggagctggctgtttcacctatttgtagtttttggttgcctcaggccatctggatgtacccatgcaggcttgggctaagaggcctgaaacccaccactttcccatgtcaaatctttagtagatgtacccccaagatacacattcctcggaccttcttttccatagttaaaacttcacccctgaaatgtagaaacaggaaggtttttttttaagtttcagtgcaaactcggagcaagtgtcataattttctgtctccgatgtgtagaggtgacattttctcagaactttcatgttaagctggaaaactggaaagcgagtccactttgtcattctgtcactcactcattttctcactcaacaaacatgcctcacacttatctaaatctgctaggctaaaagaggtccctggtgtctgtaactttctaattctgctagaattctagagtgagctcatgaaataaatgaaaaggatgaagaacaaagagaaaaaagactgcacgttcccttctggcgctcactcacattccctcagcctcagtttctccacatgcccctagaggtgatcattcaaggatttatgagattttagagacaacacatgaaaaagcaaagagacatcagaaagacaaggagttacttagtatttatacacaaggataagacattcagtatcgacaacacttaaagaaaattcaagagtgattttaaatttcccatttcaaatacctcctctattttgtttcctttctcttatgacatctctaaataagcttcctctaactgccagcaagtctaatttcattggatttgactgttttcaaccccaattagaggcagggttaagtacacttaaaataataatgaaatattattttgtttctcctcccagggctattggacgtttgacatggaatgttataaaaagtatagaaaagtctgggggtgagtattctggaagattccattggatagacttgtttctatgatgagtttaccccactgcacagaggatagtctcagcccagagcctcttgcgatgaagctcttgccagcctaactacaaacagagaggttttctgaaagaagaagatatgtatttgggagaagagtattagaatgggaaactgtgtgccattataagctatgtgcaaattcagggaggtaaaggaagacaaagatgttccacagaaaatatgaggaggacttcatgtggattttgaaatagttctccttcactacaaagatcagtaacaagggtgatgccacaccaaggttggacaggcagttgctgggcaggtgtccttgcagaaatatttttgtgtaaggttgggttgggctttctgcaagctggtggttttgccaagtattttgtgatagttttgttatcaggcacacaagcatgagaatccactcatcatagccttctttgatttatttgtcaaggtttttaatcacacacataggcacacagacacactgacacacacacacacacgtgtcataattttggttctcacaatgttcacactcgctattgtaaaacaactttttgagatttgtcctaccaaggatcccatatgtcaccaggtgttgaggtcttcggtctaaactaggctgagaccattgtggttaccacttttctccaagctttggtggcccagggactcccagcatcacgttctgtccagtgtctgcctattcccctcttctttttttcttcccttgatgcccttttatcacatgcattgtctcagacccttcgaatatgtgctcataaatgcatggcatcatctccttcccacatcgattcactttcaattaaaagccaaaactctttcatttcaactttggatttaacatgcttttgaaagaagggttgagaaatatagagaaacagattgggaaaccatgctctgctgtttcttttttttaaactttctatgtaagtgtggaatttttcattctgttttattattaactttaagccaagactttttaatagaaggatatataaatacatctttgtctatacatttctgctgaatttgaagagatgctgaatattcttaaaccattgtgttccctggtgggctgatggactgtgattttataaggtggcctcagccaactgcagcagctgttccctgtcagaggggctagaggtttggcaagagcggtggaagaggtgcagtggtgtgttcgttcactagaagcattagggagaaggttttgcctgtttgtatttcatcttctctcatcaagtcctcagaaaccacagtgctgtctgcagggtgctgtggatctggcatggcccatacaggcaacatgactgagtagaaaggacacacagctctggatgtccttgggccccacagcaactgcccttgaaacatttagtccttgtgagcatttgatgatttacttgccttcaattttccatggacctaatactctttataaagggaaatattttaaacctatgaaacattgtggagaatggcatgggaaatacccatgtatgcaccacccagcttaacaaatgctctcctgtcatttctaaccacaatctctttgaagagctcttttgtctttcaatctctcttccctgtttggcccacattacccttcatcgtatgaagacttggatggctcctgtgtcagactcttgctgtgagttatacctaatgaactagaacttaagattactgtgtattgtacatctagaggattatgtaatgtccggatcaaagtctggcttcctgggtttggctccagctgtagcataaggctgttgatgtttaatcaactctgttttctccacacagtatttatgactgtcaacagcctatgctggctatcacagatcccgacatgatcaaaacagtgctagtgaaagaatgttattctgtcttcacaaaccggagggtaagcatccattttttgaaattaaaatactcattgattgattaaatttttattttaaaattcttatatattcatagacagttgcctaaaaactgtgcaggaaggttccatgtacacttcatcctgcccatcccccatggtaacatcttgcaatcttgcataactataaatacagtatattcacattactgcagtacaggaaattaacattgatacagttcacagagtttattcagatttcaccagttttatgtgccctcatttgtgtgggtagttttttgtttttgtttttgtttgttgtttgttgtttgtttttcggactgagtcacactctgtcacccaaatgggagtacagtggtgtggtcttggctcactgcaacctccacctccagggttcaagtgattcttctgcctccacctcccgagtagctgggactacaagttgcaccaccacgccctactaatttttgtatttttagtagagacgaggtttcaccttattggccaggctggtcttgagtgtgtgggtagttctatgcaaatttatcacatttgtagatttgtgcaatgaccagcatgatcaagatgcagacccattccatctccgtatggctccctgctactatcctacagtcacgagtgtttttctctgagagggtctttatcagggaaaactttttttattttgaggaggccaatgtattaatatttttttatggattgtgcttttggtgtcaagtctgaaagttctttgcctagccctccttcctatattgccaatttttctaaaagtcataaagtttaatgctttactaaatgtaactctactatctattttgtgttattttttgtataaggtatgagatttagatcaacgttcattttttgtggcttgtagttgtccagttgttccaaagccatttttggaaatgtgggcatattgttaaaaattaattgggcatgtttctttgcatctttcatttgctattctgtcccattgatcactgtgtttattcctccatcaacaacaaactggtgactctaatacctgtacagtaactcttagcatcatgtagagtgattcttcccacttttatggatgtatttttttagatttgttttagctcttcctggtcctctgcttttccataaaaattcagaatgagtctctcagtgtctataaataaacatgctgttattttaacaagaattgaattaaatgtatagatcaatttagggaaagtctttatcttcactatgtttggtctttcaattcatgaacatagtatgcctctccatttccttagattttctctgattgcttttagcaatttgtagttttcagcatagagatcctgtgcatgttttgttggatttacagctaaagtatttcatttttgttggagtgattgtaaatgatattatgtttttcttgtattttcagatattgattgttggtacatagaaacatgcttggcttttgtttgttgatcttgtatcatagaaccttgccgagctgacttagtatttctagaagtctttttgtatattcttgagattttatacattgacaattatgtcacttgaaaatagagacaattcttttatttcctttccaatctgtatgccttttaattctttttcccagtataatgtcaaataaatgtgttgaatttttgaattgttcctaatattaggaaggaagcatttggtctttcatcatcaagaatgatttagatgaagtgggtttttttgtagattctctttatcaaatggaggaattttctctccctagtttgctgaatttttaacataaaagagtactgtaagtactcattataaaacaaaatatggctgtggaagatgaaagagagtttcaagcatgctggcttgataggccagatccaagctggcaaaaataattatctctttcttctttttttctatccatggaataaaaaattaagaggaaagaatgttaatagaatcgcattatttcttcaaaatacgttgtgagttttaaaagtattacctaccttttttattatactttttttagggtacatgtgcacaacgtgcaggtttgttacatatgtatgcatgtgccatgttggtgtgctgtactcattaactcatcatttaacattaggtataactcctaatgctatccttcccccctctccccaccccacaacaggccccagtgtgtgatgttccccttcctgtgtccatgtgttctcattgtatatttttttaaatctaccacatcaaggcacctctttttcatgttgcccatggtttaggtgaacataaagacagagctcgtctgaggcaacatacagtccaacaaagccacctgcctctctgtctccactctctctctacactgcacgcgtgctaggtgttgatcctgtctattccagtggaagaacaggttccgtaccatgtggagaatttgcatgtaaaaggagactgggatatacaggctggagaccacatcaggtggctgggcatgtgggataaatcctattgagcatctgtcatagggcctgtcacttagtagacagtcactaaatatttgttaaatacatgatgcctgtttaacacattttctacaaccatggagacctccacaactgatgtaggacaaaatctttctgctttgaactctagcctttcgggccagtgggatttatgaaaaatgccatctctatagctgaggatgaagaatggaagagaatacgatcattgctgtctccaacattcaccagcggaaaactcaaggaggtatgaaaataacttgggttttaattagaaacttaaagaatgaatcaggtggggacaggtagaaagtaagatcagagttcctttccgaggagtagtctgctgaatttgagcttcctaaaaatagtctttttatgtacagaaaacacatcataaaattcattatacaatgtcacttattgttccatgccaggcaaagtcatgtccttctgggacttatgtctgcacatttaactatgggtggtgttgtgttttgtgcttagatggtccctatcattgcccagtatggagatgtgttggtgagaaatctgaggcgggaagcagagacaggcaagcctgtcaccttgaaacagtaagtaggagcacagccatggggttctgagctgtcatgagcccctccagctgcctgctatggagctgatactcccgctgttgggttattccagtgaccagacaaaaggagggctgtggtaatgcaacttcaatgggtctcccaagatggggcagctccgatgaggaggtggggcagctggaggaaaaggatcttctcccctgtgcacagaggtcagggtttacatatctgttaaattgtcaccttggatattctggaggactaaatacatcctttagggggaaaagtgtgattgtatcaaagttttaagcatggagtgtatgggatggtggaaggggaaggcacttggtatctgttggttggcagtgagtagggtgggaaagttataatggagaacttagaataactttgatcatttcatgttttttttctgagggtatcagtagaatactaaatattaaacattcccaccatttctttttcctccagtctcaaagagagagggtggtaaaaacgctataggtggggcaagcctattatttgctgtctacacttatgcaggaacaacaggtgtaatctgagcctgtcctgggcagacaggggatatgtggtcactcactatagaagtttccaaatcaaattttgagagttttttttaaccaggacatcatttgtcattatattttacaaaaataattctgccatcagggcaacctcagctcaccacagctggggatagtggaattttccaaagcttgagcagggagtatagagaataaggatgatatttctaggagctcaggacatggtactgttgctttgtaaagtgctgaagaggaatcggctctgggcatagagtctgtagtcaggcaatgtcacctgtcttgagccccttagaaagagtgaatttttctactcttgttctgctgaagcacagtgcttacccatcttgtatcatccacaattaacacatgctactgcagttgtctgatagtggatctctgtctttctatgactaggctccttgacctcagaggtaagtctaactcagttgagtgtctccatcacccccagcggagagccagctgtgtcactgacacctgataatcaccttctgagggagtgtgatgggagatgctccagtaaatagttctgaaagtctgtggctgtttgtctgtcttgactggacatgtggatttcctgctgcacgcatagaggaaggatggtaaagaggtgctgattttaattttccacatctttctccactcagcgtctttggggcctacagcatggatgtgatcactagcacatcatttggagtgagcatcgactctctcaacaatccacaagacccctttgtggaaaacaccaagaagcttttaagatttaatccattagatccattcgttctctcaataagtatgtggactactatttccttttctctccctctctcttaaaaataactgctttattgagatgtaaatcaccatgtaattcatccacttaaaatgtacagtttaatggtttgtagtacatttgaagatatgtacgaccatcaccattgtaaactttaaaacacttctgtcattctagaaacctcatacatgtttagctatcaaccccctgccagaaatcctgttgtcgtatataaccactagtcaactttctgcatctatagatttgcctattctggacacttcatagaaatgatattaatttttcagggtttttttaattctctagttcatgaatttgtactttagtctgtattattttctttcttctgctggcttcaggcttagtttgcccttctccgtttactgtgttgtggcatgaatgtagattattgatttgtgggtttttttcctctaaatttagacattacaactataaatttccctctgggcacttgtttgctaaataacatgacattctggcctatcacatcttaatttttgctcagctcaaaacagtttctatttgcccttttaatttctacttcaacttattggttgcttaaaagtttattgtttaacttccacgtatgtgtgagtttcccaattttcgttaccttattgattttagctttatcctatgataggtgacagagatacactgtgttatttctatctgatttcttgaagagcatgattaatttaagcagcaaattatgatttgggttatcctaagagaccctagcccaatacataaaggcaaagagattagggcattgaattttgttcctttcatcattcaaaagatgcagaaggggctgctgatctcactgctgtagtggtggtccctatgcacagaccttcccttgctcagccactggcctggaagaggggcaaaagtcatagaaggaatggcttccagttgagaacactgatgtatttcactcttctgattggtagagaaaattagaattgctccaggtaaattttgtatgttcacaatggtttcgttttctgttggttttttttttctacagaagtctttccattccttaccccaattcttgaagcattaaatatcactgtgtttccaagaaaagttataagttttctaacaaaatctgtaaaacagataaaagaaggtcgcctcaaagagacacaaaaggtaaaacgtggtggtagttataggaggatgtttagttttcataattttttagaaatatacatatgatcggtgcacttccctgtatgtttttagagaaagattttaacataaagagtacttatgtttagagcaagataattcatttggtaggaatgcagaaagtggagtttgaggaaggagatatgagaatgagtcagagagagcacttaaaatttgatatcaggcacaagaattagtatgccatgacataaatattattcagataaaaccttatcacagcacttcccttcaataaattgtcaaaggataaacattactgtttggaaatacattttattggtattatgctttctctagatcatagattggtaaagagtcatttcaagtacaaggctattattttacacattctccaacaaaaggtcctatcaggccacctgctgaagtgtagtgtgtgttacatttgagccctctgacagcctcgagtgaacagaggtcttctctgggaattgaggctgcaaggctggctaactcagctttgccttcatgagccctggagtccagccaaaagatatctgcaggtcaggggggcaagaaggggtaacccaggtgtcactgaagattgtacagatttggggaatgttgcagtatttgaaagtgctcccaccaaagctgctgacaagttctggaaatgtcaggagaataatctttgtggacattggtgatgaagaagacagaagaataaaaggcccaggacttcttcatgggtatgcagttaggaccagggaaaagaccaaaaagcaattgaacattttagccagatttgtttcaggaaaacatcctgctttccaaggatttagatggatattccttttcactggtgactcaggcaacacccatcagatttctggtctccaaggggctatattctcagaagggaggttgaggactgcacttctgattaacttctgacttcacgagtcactttctgtcaataaaatttctctttttgcttctagcaccgagtggatttccttcagctgatgattgactctcagaattcaaaagactctgagacccacaaaggtaacaaaagagtgcttctgagggctactggtggggcactcagagggaaggttttgttctgaaaatgtgcaggaagtattccaggtagatgagaatttctgccacatagcagaatgacacaggtttggatgttaaaatggtagctggaggcaacttctagaggcatgcaggcatagatagccatgttctaagcttaaagggcaaccctaaggaaaactggcatgccaggaagagtcagcagtctgtggatcacctacataagatcaaatgccagttctcagcctcctccagatccacagaattaaagtttcttcctggaaatttattaggtttctgcaaaaataattgcaatttttgtgattgctttcaatggcaaaaaccgcaattacttttgcagcaacttaatgcatctaacacctaatcaggagccatgctatccaaataagggcgattttaactggcaatttttggtgaaagtgtgttcaccaggttaatcaactatgaagttattttttcctttgcaatggataagtaactttttggaaaacctctgagactgtgtaaatatcctttgtcttcagtctttcacctaccagttttacaacccatgtacgatttttactgaagtcattgttactatgagtggcaaaatgatggccatgttcagtttcaagccaccaagatttggcaatcatgtcacaaaattcctgaatatttaatcattggttctagagagcaggagtaggctgactttggcatacagatttaaatatgtccatgtctacatctacttctgtctgtctgtctatctatctatcatctgtccatcaatcatctatttatctacttactgattatctagctatcatctctctatctatcccaatacaacttgctgtgataaaggaaatagcctactgttttagtgtttcatctagaaatcactagacacatatagctattgagcactgcacatgtggctagtgccactgatgaaaaattttaagttgtatttaagtttaattgaataaaatttgattttaaatagccacatgtcaatagtggctaccacattggacagcagagctctaaactttgagattatagtttggtttcacatcagtatcatcaggttcatggtaacagaatacaattattagatagttgaatttacccacaactgcatcacagaaatcttcactggtaaatcacagctctgttgacatttctcacactcctttcgtattggttttggtggtgagttacatggttggaacaggcactatatttatttctgtgttcccggtctctaaatgtcctaatccagtcctgatcaaacagaccagtgatgggccatcctgagcttctctcaggaaaaaaatcaagagaggggccaacttgcaatcacaagagcttataccattttaatgccattcatcagactgcaatcaatcaccactcatctagctttttgtccatcttcagttgctgtacatcctgagatagtcaattctgagacctatagcctgggtctattacctggtgcctctcaaagatataatccatacttctcaacctgggctatgcacacaaattaccacatcttgtgaaattcagacttgaatcagtagttcaatggtggggtttgagattttgcatttctgtttttgttgttgttgttgttgttttgttttgttttgagacagagttttcgctcttgttgcccaggctggagtgcaatggcatgatctcagctcaccacaacctcagcctcccagattcaagcgattattctgcctcagcctcccaagtagctgggattacaggcatgcgtcaccatgcctgggtaattttgtatttttagtagagaaggggtttctccatgttggttaggctggtcttgaactcctgacctcgggtgatccacccaccttggcctcccaaagtgatgggattacaggtgtgtgccaccatgcccagcctttgcatttctaataaggtcacagatgcttatgatccacggaccacactttgagtagcaagaggtggtctgtattccaatattggtctcttaagttccctcaaacatatctaaaggaaaggtcctttaattttccatacatctagccattaatgttgcaaattctctcaaagtttgtcaaggtatattgtagctaaaatgaattacatttttcttgggagagaagactaccccatattaatttacaataaagtacttttaggatcattcaaggagcacaccatgacactgagtatgttatgcagaaatgttctctctggaaattacccagctgtgaaggtggcagggatggcacgaggaggagcggatggtctacgttcttgaagacattgggggaaaactggattaaaatgatttgccttgttctggctctgtaagacacacatcagagtgaaaccacccccagtgagactctgaattgcttttctattttttcccctggggatttgaaggttccacttagatttcttttcatctaaactgtgatgccctacattgacctgatttacctaaaatgtcttttctctcctttcagctctgtctgatctggagctcatggcccaatcaattatctttatttttgctggctatgaaaccacgagcagtgttctctccttcattatatatgaactggccactcaccctgatgtccagcagaaagtgcagaaggaaattgatacagttttacccaataaggtgagtggacagtacatggagaaggagggaggaggtgaagccttagcaaagatgcttcctcaccacttcccaggagaatttttataaaaagcataatcatgattgtttcattcacaatatgtaggaaggctctcaaaataaaaagaaggaagcatagggaatggttgctattggcagaagtataagatctttgtaaaacagtcctctccctggttcatctgctttctgttaccacaataatgctaagtaaaaaaacatccaaaaacctccctggcatttaacaatatgcatattgctcacacgtcttgatagtgagctctgctgatattggcaggacttgctctggtctggctgtgatctgatggagcctggccctgggtgcgctgtgcaggttgactcagctctgccccacatgtgtctcatgtttcagtcaggtaaccactggtgaagaagcaagctaggaaccagggtatctgacttctgagctaaactcttaaactctataatattgcctttcaaatataacactaagtactaggtgcctatcaaccacactgttttcagacctctgccaaaacttggattctttgtgctatgaagagacatggcttttgggctggtctttgtgtggcagtgaggtgagcacaaagggatgttcttcagagattacagtccagccctgaagcaacaactaggagactgtttcagcaagtgaggacagggctgtgtggggttctatccttttcataactttgcctggcactgaaatcacatgctctgataacatccaccagaactttcttttgtcatatttgggatagaaagggactagtttttcctcaaattattgatagagattttatataatatagtgtttctctccacattttatgtatataacaaaagccctgcttttgtgtatatatgcatatatatatatatacacacacacacacatatatataatacaaatcctgctttgtaactgtttttgtttgtatatataacaaaaagagttatgaaccagaagtttggccaataatccttgtcgcacagagaatttgctttttctatctgttttcacttccttggttacagacgtgtaacctcttttttgaatggtgacaatcactttgtcatattttatttgatgctagtggtcatagcctattagtcatgtttgcttccatgagaaagaaaaaccactacatggttatgctaaggatttcagtcattggggttagagccttcccgaatgtctcctgctttcataactcctccacacatcttagtgggccattgagcacatcaaagggcatgacagttattaaaatactttatgaatgctacaatcctttgccagtatgagttgttctctggaacttctaacagttcaacagtactacatggactgagttaaaagttaattcaaaaatctcaatttatccaaatctgtttctttcttttcaggcaccacccacctatgatactgtgctacagttggagtatcttgacatggtggtgaatgaaacactcagattattcccagttgctatgagacttgagagggtctgcaaaaaagatgttgaaatcaatgggatgtttattcccaaaggggtggtggtgatgattccaagctatgttcttcatcatgacccaaagtactggagagagcctgagaagttcctccctgaaaggtaggaggcccctgggaagggagccctccctgaaccagcctggttcaagcatattctgcctctctacaggacagtctgggcttgtacaatcgtttgcttgtctttttatgtttaaaaggttttttcaaatcatgaaattgatcattgtcacactttacaaaccacagactagataaaagaaaactatagccagtcacagtcccagcaacttaagatgaaggtcctcaattatgtccttatgggtcataagtgtccaaaatgtaaggactcttttaaaaacacatgatcacaatgctattattatgtcccacaaatgaatattttttcctgaatatactcaaatcttcaggaatcaaatttgaataaaaaacatgcgtctaatcttcaaagaatttataggttagtgcaacagatagacaaagaaagcagtgatgacactgctttccatcaatacagtagcatcatatgcctgtgtaaattatctgacttaaactattctatggaggtgtgggggagaaagaaggagagatggagattagaagaaggaggagaaggaggagagaaggaggggtaagacaaggtagggaggagaaggaggagaattagaaaaacaagagacgagaggagaaggaaagtgcaaaataacaattttgaagtagtgcaagacaatttcttctccttcctcatgaccaacataagggtgacttgaggcaggaatctacttttctgtcagtcattctcatcacttatgtgccttttgtagtgtgaacacatcaccatcctgactataatttgagtgtttagaaataaatatactttgcaacagtatttatctcctctcaacaagactgaaagctcctataatgtaaggagagtagaaaggatctgtaccttacaattctcatagcaaaatatgcatagcaggatttcagtgactagcccacaaaagtatcctgtgtactgctagtagaggggtgggccctaagtaagaaaccctaacatgtaactcttagaggtattatgtctttaacttttaaaatatctaccaatatggaaccaggttcagtaaaaagaacaaggacaacatagatccttacatatacacaccctttggaagtggacccagaaactgcattggcatgaggtttgctctcgtgaacatgaaacttgctctagtcagagtccttcagaacttctccttcaaaccttgtaaagaaacacaggtcagtcaattttctgcattaataatgttttattaacaattattttaactgaatggtctatatatttaaaaaagaatacactcacttaatcttttaataatttgttctatgggccaaggaatctatttggacccatctatgatctttaagggtgcttcagttctggagttcaaaagctgtagcattaaaaacatcatgcaatgtcaatgtagactagcatgacatgattatctacagtctccttgaacttgagcaaaattaaattcagtttcaagtcaattggaaagatggggaagtattttgcacaatcatgaggtgcacttattatcttgttttgacttttgaatgatgctcttccttcccagaacttgtagaagttttctcatgacagtggctcccaaccactagctgtacattggaatcaccagggagctttaaaaattcatgatgcctggaacatctcagaaattctaaactaatttgcccagagtgtggctttaaaagctcccccattgcttctcatgtgaagccaaggtggaaaatgactaatttaaggtagttctattggatacgaaggactaccacagtccaaggccatccttactgacctcaccttccaggtgcctagctccaaccaactgggctccttttcaactcaattataactctgctaatcttctttcctttcttctcctcattctgttcttatctttcaagtcctagttcaattcccaagcccctccaaggtgtcttcttgacctagtccagggctcatttactcctctgctctgttattagttactggaggctattatcatataatttcataatttgccattaaatcattgagttttgttctctatattttctctttatctaagaatgtcttcccccctccattaacaatatcttctcattttattccatttaaaatatcccagtggtgccttgcaagtgacctcatctaactcaagcatttggtcatttggtaaatgtttaaggagtgatatgcagtcgattggtttgcatacaaatattaagttttttaatgtgaacatttagcaaatgacattcatgtatttgcatgtgtgtgtgcttgcacatgtgcacatgcatgtctgtctgcagggaaaatatattcatgccttttgaaaatttttaaataatgtgttatatttatagaaagatttggaaccttttctctgaagaagttaaagaacagatgtcattgattcatattaagcaagaccctataaatcttatttctaggtctcatgtatttattaagcaactccacaccttaagcaggctttctacatagaagaggaagaagatagagatggtttccatattattttcatattccacattatttgtggctttaggccagctatgtagctatcctgtatgtgtgctcagacaggagactcagccctgagagaaggcggtcctctggcacacctaggatggggaaggtactcccttggaagtcccaagctggcacttctggatctccatggcaattttcttgcccatcactccatggagatcagaatatcactctattgtgtcccctcaacactgaaggagtgtctcaataagaaaagttgagtcaaaacactgtaggaattgagaggttccccacttgcactacccttgtaaaccaagagaagatgttaaaaaataaaacgataatgcttcctgaaggtgtcttcccatctttacactagatgggttcaattgagaggaattactggactgtggaagttgaagactgtccacataattaaaatgtacaatagctactcaggattaccttgcaagtttcaacatacacaaaattaacttcataagatggtttaaaaagtttaccgttatacctaataatctggtttaaatttttaaaactcatccattttcgttaaaatttaaatcaaaaaagaacacgggttcccatgaatttgtctcaggtcaaacctcacacagaataggtgctccatgaatattttgttaaatgatagatgatgaatgttctcactatccaatcttcacacatcttatagagtaagtataacgaatccaagatttatagtgctgaaagtagtttttatatgtttacaaagcattattgtcagtaatttttttttactttgatgctatactttctacttttgctttatttaatgcttctcaatatgctcgtttaactgttgcagatccccctgaaattacgctttggaggacttcttctaacagaaaaacccattgttctaaaggctgagtcaagggatgagaccgtaagtggagcctgatttccctaaggacttctggtttgctcttcaagaaagctgtgccccagaacaccagagacctcaaattactttacaaatagaaccctgaaatgaagacgggcttcatccaatgtgctgcataaataatcggggattctgtacgtgcattgtgctctctcatggtctgtatagagtgttatacttggtaatatagaggagatgaccaaatcagtgctggggaagtagatttggcttctctgcttctcataggactatctccaccacccccagttagcaccattaactcctcctgagctctgataacataattaacatttctcaataatttcaaccacaatcattaataaaaataggaattattttgatggctctaacagtgacatttatatcatgtgttatatctgtagtattctatagtaagctttatattaagcaaatcaataaaaacctctttacaaaagta

SEQ ID NO: 139 - DNA, 20344 bp, Homo sapiens
ggaactgcaaccatggtgcccagcttcctctccctgagcttctcctccttgggcctgtgggcttctgggctgatcttggtcttaggctttctcaagctcatccacctgctgctgcggaggcagacgttggctaaggctatggacaaattcccagggcctcccacccactggctttttggacatgccctcgaggtatgtggaggtcgggagggtgggggagaaagaaaacatcctccctcctttcagagaatcaggcctaattcccagggggctgtggagggagacttcaaacttgggcagggggatgatgtcctgggatccatggcttccattcagctttcccaccggaatttctccttcactccagcctttcaagctgacttcagaagtgggggcaacttccaagtcagggctcaagcatggcacagacaccttctcctcattctgaggcccaaagtttggaccaggttctgctaaaagctcagcaatgacagaaaggcaatggcagaaatccaaaacctctggatagtacatagaagtaggcaatccattgaaagctcaatcagcgtccgtgttgttgtgtgtagtgtaaagatttccatttgtaaggcaggaaatgagagtgagcatgaagatgagtaccgccacatgacagacctcaccgagtgtctaagcggttggtgtccccaaaggcagggctctcccggccatgcctatgggtggctcaggagccgtgacaccttcccaggttcagatcatggttcgtcttcctgttactccagggtgggaaccaccttagcccctgctctcaggaagatctcttagtttcctactgtattggggatctagaccagaggtttctaattagacacagggcagggaattggaatcaactgggaggagcaaattcctggacctccagttcctggagattccaatttgtcagattggaactaggagtttacatttataaacctgtccaagtgttagtgttttgatctgcagccagcttggggaatccaggtagagatgccagagacttttctttctttccctctctttttcctttcctttccctttccctttctttctttctttttttcttctttctttctctttctttctttctctttctttctttctttctctttctctctttctttctttctttccttccttccttccttccttccttccttccttccttccttccttccttccttccttccttctttccttccttctctttctctctctctctttctttctttctttttttgatggggagttttgctctctctcccaggctggggtgcagtggcgcaattttggctcactgcaacctctgcctcccagattcaagcaattctcgtgcctcagcctcccaagtagctgggaccacaggcacgcgccaccatgcctagctaatttttgcatttttgtagagatggggtttcactatgttgggcaggctggtctcaaactcctgacctcaagtgatccacctgcctcggcctcccaaagtgctgggattataggtgtgagccaccgcgcctggctgacatgccagagattgaggctcagagtgaggcaagttccttctcctaccttctgaactcactttcctcattctcagtctggatgggggcactgcttctcttccttgattgacactagaaatgagcttgacctctaggcttattcttgccctgacagataaccctgtaacatgcatcctgaagacatccaggaaaggaaagtgtgggtcagagagatgaatcagacccaggcctggggttcaaagagcttacggtctgaagggaaaacagacaccagagccttgctcccgagctgggcgaggttcctccccaggattctgccttagccgcattattttgatctcagcacctgtcctgttggattgaagtcttctgtttacctattcaacttctgcactagactttggctcctggaggatggagatctgatctgattcatccctgtaccctcagggtccagcataaagcctagcatagtgtaggcatcactaatgaaccagtagtgaatgttggagggtagggagagtatccacagaggagaaagcatgagggagaagaaaagcaaagggaccaggagggcttgggagaggctttgctaagtacacaagagggccaagggaaggttgaggtctgacgctaaaagggtacaagaggtatttagagagaactttctccctttcttcttgttccctctccacttctacctgccttcgtcaaagttgtgtttgccctcagccagggacttctttaggacagggaccttgcacccccacctccatgtcagagctggctgttttcttccccttaacggcccccacccccaccttgagagtatgcagagggcctggaacacagtctagctttggcttcttggctctaacacaactgtctgaagggccttctcttggcatcaggttgagcagacaaaggctggaggagtgactacttgtgggagctacaaaggtttcctggggaaccattgcaagcacaactcctgcagtcctcaagggcttggcacctctgttcttgcctggattcatacctgaacttgagaaatgggttgggcagagaggggattattttccctaatgtaaaaatgaggacattgaagttcagagagtgcaaagtatttgtctatgtctgtttagtagctcaggagttaggtcgagactgggcccaggacttctgcattttaattcgtaatgttgtcagaccataaaaggttactgcaaagttgattcttaggcccagcaatgatgggagtaggaaggggaggaagactgatgggtaaagggactgggggcagggaagagctgtccgtcaggattaatttctccttcttggtctctgattacagtctggaggccttggtagcatctacctgtcatcctcctcaattctcagaatgtgtcttctggaggtggggacatgtcctattcttccagggtccccctcattccagtctaggaaccagggaggactttgcacatagtaggtgctcagctatattgttggcctgaggttggaacccttgaaagaagccaacaaattggtgtgtgtgggtgtgtgtgtgtgtgtagaatgccagctcccagatcaaggaaatgagatactctgagactgcagaggcctctttcccagccatgccctttgctgtgagagtgcccttgaccttgtgctgtgtagtgaagacagggctgtggctcattttcattcagtaaacattgattacaggccttcgctgtgcccagttagctaagccactttacctctctgtgcttctgtttccctgtcaacaaagtggagataatcatttttaccttactgggttagaaggggatagaaagagataaagtataggtattttgcaaactactgggcagataaacgtcaggtgttaaatcatcatagagggattcttgctacaaaacaccctggggcatttgctttcttcatccccttccttcttctcaaatcaacccagtctttgtgaaccagatatggtccctctttcctaagcaaccagcagtgtctgatcaacaactctgggtctggtcctatgctgaggccagaggatgaagaatcaagacaaagagcttgcctcagaggaactaggtctgtaggagagatgaataacacagcacatgtgttaccaatctttgggcctagagaagggcccctctcggcgtggggagtcagggaaggtccagggaggtgatgctgaggcacattctcaaagatctggaggtagaaacctgtggcaggaagtgcagaagaaaaggcagaaggtgctctctgtgcaaaaaggcacacaggctggaaaaagcagtgtgtttaggaaattaaattgtcttttggggtctaggacatacctgtgttagtacctcagcgcttctgcagtggtgacagggaggacagaatggagaggatgaggctggaggtagacggggcagtcacacagatccttgaggccaggtcaaaaggctttaccttattttgaggacgatggggaatgatggaaggaatttaagcaagggagagacaagctcagacttatgttttagaaagatcactttggcttcaaggtggcgaacagattgacagagggcaaataggaggcagggaggctagggtggaggtgatccaggcctccaccttgtgttggggagtgagccagtgggctggaggaaagtggaaggtagggcaggccaggtcttggcatggtagccacaggagagagaggcgttgagacctccaccatagccagatgtgagggtcagtgagggctcctccatgtagcaggaaaaggaaacaaggattacccttggagctctgttaattggaggcatcaacacagctggactagagcagaatctagcgaaagtcatcaaaggagagccataagactggattgtaaacaggaggaatgaatttctatgtctcaattttaaaatgtgggcatctgagacccaggaagaggaggctcagtggtgggcagcacttgtcagtgtctgggtatgggatcctcgagtactggttttggagaattccgtggcagagtctcctcccatgacctgctacatctggttctttttgctctggtttgctgatttcaatgtaaaaatcacttggtgggcctgcagggaggaggggctgcctccacagggcatccctcttcatattgatataaaccatggagaaaacgacattccatattcctggctagtttttgggtgggtgatggtaccatccccaggttcagtaggagaggcagattttggggacaaaagtgtacgaacatgtgtatgagtgtgggtttggaaatgctgggtctgaagaatctggagggtgtcatgcagagagttccgggggttgattatgattctggacctcaggagaaaggtaaactggaaagagctgtcaactgagaaattgttggtaggtagatggcacaggaaaccacagaagcaggtgagagctttcagggagaagacgcaagggaagaggccaaggactggatctggaggaacaaagagtgggtgaggagctgcccatggcagccactgggagagaggggaggacatccaggagacagtgcatgagagacagggagtcaactgggctcagcgccagggagggtgctggattccttagcaagatcagcataggagaggtggggccatcacaaggaattggaaacagtgggcacagctctttagagaagttagattatgaagggatgagcaaataaggtgttagctggaggaggaagctgaacaaagggaggtttggtttcattttctttcttttttttttttttaaagtgagagacttgaacaaattttgaatgaggatgggaaggagcctgcagagagggtgaggtctgtgatttgggagagaggggctgattgatgggtgaggtgccttgtggggagggttggaatccagatggactggtcttggacaggccctgcatgcttctctcctgaaacagagggaaacagagaggctgggtgcaggtggggtggtccttcaggtctgccagctgactttttggggtttcttatctgatggtttctattttctctgggaagtacagcaagggtgatctgccaggagtgaggaggggagaggtagagagggcagttgaaataaaagtttttgagaagcagattgtggctgatgccatggggctttccagaaggcatttctgctgatctttgctgaaatgtcaccttagagtggccttcctgacccacccccatccatagtggcagccctgccccttactctgctttttttctttctggagttatcactacatgaaattgtattcttggtgtatttgattctttttattttctttctccccacttggaatgtatgctggtggggcagggctttgtcttgctcaccactgtaaccagaaactagcactgtccctggcacaatgcccatgtgttggaagagtggatgaatctctggggggaaccaactctgggcagcaaagccacccatgcggactgaggacagatgactgcatccccttggactcttgggcatttcttgggtccctgccttcctgcctttttagctgtttggatgttttcctgcattcctcctctcatctgattgggtgctcctgagtctggagttcacctttggatgctgaagacaggagggatgttgggggcagagcacaggctttggaatctaaagactggggcacgatgctagttgtgtgactttgggcaaagcccatcatcacttcctagccaaggcatggtggctagagagtcctggtgaccacactgatctcacccaaagtctctttgctccttctattgagctaggggttctttctgtatgttatctgttcacatgtacatgtgtaatggtttatttgtctttgaaagggaggatggaggatgaagtcatgtttgtcaccagcatgggaggaagtcacctctctgctccctggggtattttgcattcgatcccctctttccaggctctccatggctctgttcaacctcacagctgaatccccaatgagtttttgtacattgagtctgcttttcccactgatttttatagttatttcagagatgctacatcttctcccttttggttgtttttttcttggcttctagctctttagctttatttaaaagcttggcagtggcttggactcatgcacacatggagctctggtaattttggggtgtggggagagggcccatagtagggagacagctgagactagggcaccaaagggcacctaagggtgtccatcctgaaggagagcagtcctagggggttctagcccccaattcccaatccctgcaggacttccctgggcagtgggagcctgtgtggtcccagagggagacccatggggaaggctatgggcaggtgtctttcactttagcgactaagaagccttttgaggaattaagactgtccaaagatggttggggtattttgaaaagaagtttcctgtcactagagatgtttgagcacttgggcagggattcttactgggtgaaggtgctgggcaggcaccctgtgtgctgggaatccgagaccgacatgacctgccttgagggaactatgacatgctgccgaaaaggaaaccccttcgtctttctcctccctcaccttttgtttttcgaaactcttatccccattttgtgagcagactgattttcattctgaagcagccccctggggcactgtagctgcagcacactggtcaagggtagcttgtttcttggacactggcccactgagcttcgggtcaactggctgatggcttgagcaggcttgctaacaagggctgcagaaagagactaagccaggatccctggtctcccttaactcatgctggactgttccctttggtctttgtaccgcacgtttccacctttaaagagaggtcagggttccactaggcaatgttgaaatccttttccgatctgattcttggagcaaagcttactttaggctcttgagaagcagagaggaaagtggtgacgtatgcttgctcttcccaatccctccagtggtttatttctggtgaggtcaacaaggagtgccaatgtgagggtgggaggtggggctggggagctgggatcagtgaattattttcataccctgctctcttcctgtttccttccttctggagaaaaaacaagccgtcccagaacttccagtcctgtaagtgtcccagctcaggcattctgagggcgagtctgaggcatgcagttgtgtaatccagaggaactgtccaggcagtcacgtgtaccccacagggaggatgcctcagccctcttgaggggctgcagctgcaatagtgggaccaggtgctgggagctgtcctccttcttaccaggctcccggggtaatcaaggcaggtgcctggcaggtgcttctagttctctagctttatttaaaagtttggccatcgcttgggctcatgcacatgttttttatttatcttagttttctttatttcttaaataaatctaaagagctaggagaaagctgggcacagggaggcagtggcaagctggctgcgacctcgatcagggcacaggttgtgaatgtggtcagcatgagaccagggtctactgtcccttgtggggttgctgcagaggtgcacaagcatagctgataaggagggaagtggggcttggatgaaccagatcagccaaaggctccttccaatcctaagatcctatgagtctggcttttttgtgacttaagcctttccttgacccatccaattgggctttctggacctggtagggatggagagaaggggaatggccaggtgaccaggaagttggcaaggaaaacccaggagggcagatggaaaaataagacagacaccagggaaaggagcacttccagggataccagccaggagggaggcaggcatacaagaatgtttccccttgcctgtgggtggagatgatttttatcactttgtgttctttttgacatcgtgtactcaagggcagtgaaaactcttacagccctgttgggttgaactcaggattctgcgttcagaggcagtgagggaagggatcaatgggatgattacagacgactccacagagggcctaggaggggaagagccctagagaaggcacagacgggtggctggaggccaaaataggcccaatcccatgagcccttggagatagtggcttgggccagaaaggatccctgggggctacattatcagatgcctgtgtccttctttaagaatgttccctggaagatacaacatggatgtcttagtcctttgtgttgctgtaaatgaatacctgagactgggtaaaaggtttatttggctcacagttccacaggctgtacaggaggcatggtcaatatctgcttctggtgaaactgctattcatgaggaggagctttaggaaactgctattcatgaggaagagcagacatcacatggcaagagaggaggaaaggagaaagagagagagagagagagaggtgccagactctttttaacaaacagctctcaaatggtatttctagttctagatccctgaggaatcgccacactgacttccacaatgattgaactagtttacagtcccaccaacagtgtaaaagtgttcctatttctccacatcctctccagcacctgttgtttcctgactttttaatgattgtcattctaactggtgtgagatggtatctcattgtggttttgatttgcatttctctgatggccagtgatgatgagcattttttcatgtgttttttggctgcataaatgtcttcttttgagaagtgtctgttcatgtccttcgcccactttttgatggggttgtttgtttttttcttgtaaatttgtttgagttcattgtagattctggatattagccctttgtcagatgagtaggttgcgaaaattttctcccattttgtaggttgcctgcagccctcccattactgggtatatacccaaaggactataaatcatgctgctataaagacacatgcacacgtatgtttattgcggcattattcacaatagcaaagacttggaaccaacccaaaggtccaacaatgatagactggattaagaaaatggggcacatatacaccatggaatactatgcagccataaaaaatgatgagttcatgtcctttgtagggacatggatgaaattggaaatcatcattctcagtaaactatcgcaagaacaaaaaaccaaacaccgcatattctcactcataggtgggaattgaacaatgagatcacatggacacaggaaggggaatatcacactctggggactgtggtggggtggggggaggggggaggggtagcattgggagatatacataatgctagatgacgagttagtgggtgcagcgcaccagcatggcacatgtatacatatgtaactaacctgcacaatgtgcacatgtaccctaaaacttaaagtataataaaaaaaacccaaaaaacaaacaaaaaacaaaaaaataaacaatatgcaaaatccttaaaaaaaaacaaaacaaaacaaaacaaaaaaaagctctcatgggaactaagagaactcactcaatcctgccagaatggccccagggccattcatgagggatccacccctatgatgccaacacctcccatgaggccccacctccaacattggagatcagatttcaaaatgagattaggaggggacaaatgtccaaattattaaggtttggacatttttcccttcctaatttgtttggatactatcagtgaataggtggcaattgtgagagagaattttacggagagaaaaagcaggcccagcacaggctcaggcctcaacaggaattttatgggactgtaacctaacctctctattccttaggctcctcttccctaaaatgggaccacttagagttgttgtgaggattcaatcaggtcaaaatgtaaggtgcttagaacaaggtctagcacacagcaagtgcttaataaagattagtcattaccatgcctccccacaaactccagagcttggaccttttccaaggcccctgggcaggccactaggagtgttaagtgtatctttgaaagactcccactaaatggggaaaaatagttaaatacattatggtacatccttatagtgaaatactacacaactgttaaaaatagtaatgacagttaagtgcactagcttggaaaggaggacaagttatgttcaatgaaaaatggctggttttgcaaaaatatttattgtataacttcatttacttaaaacacctctgggtgagtaaacgtgactagaaaaacctccaaaggacatgtaccaccctctggatgacctattcaagctcatcccaggtgactgtcccaccatggggcagctcctggaagacaccatgatctttcccaacccagcgcgtttgtgctttctgttttctcacctggaatgcttttcctttatgcttcacatggccagagactcaccatccttcaagtttcaccttaaatgttgtctccaacaagaagccttccaagattaccctatctaagcaggccctccctgttagtgtctctcatagcactgtttttattctgagcactcactattgtctgtgattattttacttaattgtctacttgtctattatctgtcttctccatagaatgaaagggcagaacttgtctgtctcattcccctgagatgtctagaacagagccctgcacatgtaggccctcaataaaaatgtgttgaacgatacggcaggggtggaattgaggccatttctctattgcacaatgagcaaatattacctatctttataattaaagagctttaatgtggagaagaaagcactttctggctgcagtgcagtagagagttggtggcaggtgctaaatggaagcaggttggctactttggggatgttgagctaaccccggtgtgagaagagggcggcttggaattagagcagtggttgtggggctggagaggggactaagcccagggatgtttaggagaagagggtgcaggagaggtaaggaagcaaccagggcctgcctgggcagccttctcccctgccctcccagggacttggggcctagctggtgacaatgtgttcctgagtgaccttggccttctgtcatcatttcagatccaggagacggggagcctggacaaagtggtgtcctgggcccaccagttcccgtatgcccacccactctggttcggacagttcattggcttcctgaacatctatgagcctgactatgccaaagctgtgtacagccgtgggggtgaggagagaggatggggatctcaggagagggtggggcttcctgagaacaaagggctcagggcatgatatggggaggaagcctgggcctgtgtactaagtctgcggagctgaggttcccaccctactcataaatgagcctcctctaggaaccccgggtccctgcttgacctgattgtctcctcctgcagaccctaaggcccctgatgtgtatgacttcttcctccagtggattggtgagtgagcacctgccttccctgccctgccaacctcagacccgtggtgctgggtgactaggatcctggcctgtcccactcaattggttatcccagatggcctagttctcgggtgcccatcctaagctcagctgctcagtggagagacaagggaggagcaggagagcccccagctgtggggccaaggcatcttctctggcagggcctgattctctagacagggcaaaggctttggagaatgtgtgagtgcgaagaacagtttcctgaaggaggtggcactagagttgatccaaaaggagatttaaataggtagtgctggccagggcaagggcctaaggaaatggtgtggtggtaggaccacggctggtcaccagaggctgtgaggctgtcggggtggctacaaggcagagcccagcttggagatgatgctgggcagggaggacaggccagccttgactgccaggataaggaggtgatttgatgttgagagtaggtgggagtcattgagtattttattttattttattttactttttcctttacagaggtactcaagttaaagccattgagtattctttagccaaggccatatgcttctccaaagctcctcttttactcatgatcctatggtgtcttcagcgttttcctgggagctgagaaagggcagggccaagagggagaacacattcccaatcctatttactcaccgagtaccactgggaagactttttgcttctaaccctctttttagttatcaatgggaggataaaattagaaggcagacagaaaagggttaggaaaatgaagaggtggttttgaagacaggaatgcatttccattgctgggtgtgttggagtggggtaggaagggtcccacctgaggccatgaagcacgaacacggtgggacattccctaagtcctgaagctgtggccagtctcagcagctgagagtcaaggctcagcaggctccccctctgcttggctgtccccagggggatgcgtgtcctttgtctcacatctggcaatgtcatctgacacaagttcctggacccaggctttgtgggtgcagctgagatacagaaactgagttatcctgtcctaaggaaggagctcactcagccaagaactgctgccacctgtctcctgaggtcctggtagcctagggtgagggcatggagggcaatactgggtcgcttagtggcccacccttggagggttccaggctcagggatggagtcgtgtaggatgtgcttagccccaggctgccagggcctggactgaccagccctctctctcccatcccttccccagggagaggcctgctggttcttgaggggcccaagtggttgcagcaccgcaagctgctcacacctggctttcattatgatgtgctgaagccctatgtggccgtgttcactgagtctacacgtatcatgctggtgagctccctgtgccagagtactggaggctgttgcctgctgggctagcccctctccaccctgattttgtcctggggagagtaggtggtgctctgcagtaaggagaatagctgagccccaaggcctgttctgcctgcaacagcagtgccaaagccctgctctactgacatgtgccgcaggctgccactgagtcggtgctgaatctctaagtgtcctggcagcccgatccttgtctccaccaggagacccagccctctttcctcccaggccaaagggtctctgtgagaacttaataaggctcctagcatagcaggtttgaggactgcctatatttgagagtatggggaaaggctttcacatctaaaacgtgtctcctcattttctgtctaccacagctgcccagaattatgtcaatacaactcatctctaagagggatgtcagaggtcagggttagagtcttagggctgggtaatccctaagttatccaggctagtctttccccttgtaggaaactcccctccaggattacttacatatacaccatgcgggggagctcaccacctctcagccatcctactcccttataggctgccctgactgggagaaaacgtctgtgtgctgtgcaagatctgcctcctggtcctgccctctgagcctgaagcccagaggcttccaaacttctacccaccctatcctgatattccagcaggatggagggcaggacagggactgggagtgtgtgaagggggcttggtggtggaggataggctacgggtcctggagggcagcttggggcatccagcccaactaacccctgcatcgcctcctacacattgcctcctatccctggactccaggacaagtgggaagagaaagctcgggagggtaagtcctttgacatcttctgcgatgtgggtcacatggcgctgaacacactcatgaagtgcacctttggaagaggagacaccggcctgggccacaggtcaggagccacctcggggctgaccgcactgtctccaaagccatcttagaggggagagttggcaggggtcctgggctctgatctgagaagagatagggtcctgccccagggagccttagcttgcggggagacaggacctgctcatggtggggtaaacacctggctttagcaaggaggcttaagggcagggagaagaagagcaggatgctctgtggttggggctagattcctggaatggagtttctctggctctgctcctgggccagtgtctaagccaatccctcctcctaccctctgcttagcagggacagcagctactaccttgcagtcagcgatctcactctgttgatgcagcagcgccttgtgtccttccagtaccataatgacttcatctactggctcaccccacatggccgccgcttcctgcgggcctgccaggtggcccatgaccatacaggtgggcctttcccacaaggctcacctctaggaagcctgggttcctcctcctggcccctctatgccccctcccattataggaccccagttcccctttggacaaaagatggcttcccaggcagtgacactctgtgcttttggttcagaccaggtcatcagggagcggaaggcagccctgcaggatgagaaggtgcggaagaagatccagaaccggaggcacctggacttcctggacattctcctgggtgcccgggtgagtacattgttgcccacccctacctgaggactggtcccagagaggtcttcaaccatcctcccaggacagcagaaggagctcttaagcatttccccctttcctcagcaaatataacctgttcctcgtcccatgaaacatattagcaggggttcagaggtgggcaggtgtagggtgtgtgtgcctgagctgtggagttgggagcctaggtcacgtggtagtggctggacgacatttctagacttctaagatcccccaaaatgttggccttgtagaatcctagaatcttagacttcattcattcattcattcattcagtaagttctttattcatcaattctagaaactcactgagttctgactctgggtcatttccgtgctaggatgcagagatgggaaagacctggcccttccttccagatgcttacagtccagcaggggagacagtaggtagatgttgaccaaaatgtcttcctctggcaggtggtattctatgtgcccagtgagcagaacagtcagggctggacaaggtcacaagtcatttggccagagcatttagggagggctttgtggaggaggaggcatccaggctgagctttgaaggaatataggaatctgggggaaggtcctaatccaccctctgaaaaggagctttcactccctcccagagaccttcatttgacaaccaccattatgagttcttcttgttacccacctccaatacctcaagctgtcctattatgccttccctaacccaggatgaagatgacatcaaactgtcagatgcagacctccgggctgaagtggacacattcatgtttgaaggccatgacaccaccaccagtggtatctcctggtttctctactgcatggccctgtaccctgagcaccagcatcgttgtagagaggaggtccgcgagatcctaggggaccaggacttcttccagtggtgagtctgagggtgggcccggtttatcctgctcagcccttgggaagggcgatgcccatcctgtcctgaaccatcctggaaatcaggtgaggtggcggctgctatcctgttacccccagtgtcataccttttgtggtggtggggggtggggagagtggttggctgggcacagatgcacccctgagcccattctcccaaaatggagcctttcagaagtgttatgtagagaaagttgtcaacaagaggctgatattttgtgtgctaacttcttctgacggtagaacctgattacccttctgggtccctggatagagtagggagagctgggagagaaagaggtggaaatgtgggggtgaacagagctgagacagctgggagagccagttccttgctacttgcctttggatggcaatactcagcttccagatgccatatctctcctgctggtgaaggagaaaagacttccccaaacttcatcacttaaaaactttccattgttttcccctgtttcttggctcaagactgaactcctaaacacttaaggattgaccctgacctctctgcagtgtgatctctgggagtctctcaagaggctccttcacccttgctggctgcctgttcccctcaggcctttgcttgtggtcagacaacctgcctttctctctgggctcctgagcagcctccaagagggggctaggcacacagcaggggtacagaaaatgctgagccagagggggaactttagatccacttgaaagggactgacctataactccagggtctaggacctggagtatgaagcctccattaccatttctgttggtcatatgtgagaatcccccccccacggggtatccagacacatgccaggtgctatcaggggtgcagaacggaagagaaagagaagccatgctgctcgtggggagttttatggagacaaattcacataatcaaacagcgagagaaaaatcacaggatcacgtggtctgaatgttgagggcagagggaaggagtgaggcttgaactgactttctaaggagggttaaaattcaggcaaagagagagaggtaggcattgtaggctgggtaacaatgtgaacacaacccgaggcagggattagaatatttattttattttcacgtcattccatctagagcttgaagcaacttagaggacagttattcaataaaatagtaaaatgcaaatgaaaaataagagccagtggggagtttggggactctgcaataaaatattgccctgtagttatagttggatgtcacatttgggcctgagcttcccggttgccaaagggaaaagacacacacacacacacacacacacttcacctcattaaataatgcatcaactttggttggttcattcaaccaacgtgtatcagccccagtttctttcattcagctcagtaggggaaaccaagctgaaacctaaagaactgtcctttgtaggcttccatgggggtcctgagagttgcagaagtgaccttgtctttgatggctgggtgcaccttcatctctagggtcctgtgccttcttctcctaccagtgaagatgagaaagggatggagaaaagtggaaccagatcctttagatctgagtgttcacaccatgtcaggcctagcctggccaggggcacttggaactctgtgcctctgactcttgagtgtgtggtggtggtgagggaggaaaactggggctggggtctgctttctcgccaaatcctgttgcttcccattccaagaatgttctggttgtgttgctggcagggatgatctgggcaaaatgacttatctgaccatgtgcatcaaggagagcttccgcctctacccacctgtgccccaggtgtaccgccagctcagcaagcctgtcacctttgtggatggccggtctctacctgcaggtgggatgggtggatttgggggtggaaaaggagtccctgcatgctcctctggcaccctctgtgcctttagtcaaatctttgcacttttggggaagagctcaggctttgcgttcagagagccctgggtctaaatcccagccccacaacatattgatcaattcttctacctctgagcctccatttccccttctgtaaaatggggatgagaagagtatctatgtttctaggctgctgtcaggattaaagagaatgttcaccaaggctgccatgtaccaccatgcaggtcatgccctgaacagcaccagggagcaacactcacatagactatgatgctgtgcagtgtgcaacctgcacaactgtatgtggtagcttcataaagagtgttaagcctgtacctggttcatagcaagcacctggtgaatgatagctgttactgttggcagtataatattatgaataataacttcccaagagtcagttagctgaaaaggtttaatagttccttcctgttctacctcatgatggatgggttcattctcccctttattcatctcacaaatgtctatcaggtgctgtacccagtgccgggattacaggaactgggcatcatgatgatcaaagtactgtgatgagtcggatgtggtcatgaacgctctgtcactggcagtggtcaggcaggagctggcaccccagttaaggggtcactaggggactctgaccttatgtggaggtaggcctggctacccaggactacctggtcaccaacctctgttctgcccacaggaagcctgatctctatgcatatctatgccctccataggaacagtgctgtatggcccgaccctgaggtaccctttccctgggctgggagatcagacagggtgggggactgggagggtcaccctctgccagaacctggcgagtgtttaagcaaggcctgtcccttcaggtctttgactctctgcgcttttccactgagaatgcatccaaacgccatccctttgcctttatgcccttctctgctgggcccaggtatggagagacccagtatcccaggccctcaggactggggaggagagggtggatgacatcataggggaggcactattagaaggtactctgaataaaggggaatcatgctgggtttgtggtggttctaatgcaggaggcttcttcttgcaattatcatattcctgtccctgggaagtgggtgggatagatgagtcattccaagagagaaccccatgccagacccccaccatgtgaatctacctggtctgggaccctcaccatgctcccaaggtttgtttcataagcccaggtcaaccaatctatcagccagttattcatccaaaaacagttattgacttttgttggctgctaagagcactgaatgtcatcactctggatgctccattgcacgatgactctttgtgctgcttgctacaggaactgcattgggcagcagtttgccatgagtgagatgaaggtggtcacagccatgtgcttgctccgctttgagttctctctggacccctcacggctgcccatcaagatgccccagcttgtcctgcgctccaagaatggctttcacctccacctgaagccactgggccctgggtctgggaagtagctctgatgagaatggggtcccagatggctcaggctgtgacctccctgggcaccaccctccccaggctgggtgtggaggagttggggccccctgccttcaggaggcttgtagtttagaagggaagtaggcattaccatagacgactcctagaggacagtgctatgtaaaaatgtgtgtctataaatgtttatcatgcatgtattctagagctcattcatttattcaacaaacatttggtgagcacctatttcgttcgagaaacttcatttatctcctataattggcaaacttaaaaatgcagcagaaacttacattccaaccttagagactcatagtgagcacaaggaaagttttgccctgagattcatggttatggctgggtaccaccaaatagaagaatggcttaggggagtgccccttcactgagatgtgtttctttgttgaactttgtgtgtgtgtgtttagaatataacagacataagaaaaaattacctaaatgaagactgtacaaaataataaataattctgaagcagactctcttgtaaccatcactgaagtcaagaaatatggaatatggtatcactgatgtgtcttctgc

SEQ ID NO: 140 - DNA, 5926 bp, Homo sapiens
ctctgagccctgctcggtttaggcctgtctgcggaatccgcaccaaccagcaccatgcccatgatactggggtactgggacatccgcggggtgagcgagggtccgctggacggtgggacgagggcgcaggggagggaagtgcgaagcagctgcgggacggactctagggaccgttcctcttcagggctgcccgcctcagaagggcctgtgcatgccgctgtgtgtgtgttgggggtgtgggcgggtagaggaggcaacgggtacgtgcagtgtaaactgggggcttccctggtgcagacaaagtcagggaccctccatctctgacgcgacctgcgggccatctctcccagctggcccacgccatccgcctgctcctggaatacacagactcaagctatgaggaaaagaagtacacgatgggggacggtaatggcaccctcgtgttcgggctctgcccactcacgctaagttggcaccaagcaacccatggtggccacctgtggctgcctctgcaggcctcccctgctggagctgcaggctgtctcttccctgagccccggtgagggagccctctggccttgcaaggcagaatgctggggtgggatgctgggccccctgtctaattgggacgggtgtccctcagggcttgcctaaaccctggaagccttagctgtgtggggtccagagccctcagcgggattctttgtccctgaaccctgggatgtgggactgagtggtcagattctagatccacctgtctcagggatcttgccactggctccgtgggagggtccccgggaaggagggctgggctctggggaggtttgttttcacttcttcttccccaccacagctcctgattatgacagaagccagtggctgaatgaaaaattcaagctgggcctggactttcccaatgtaggtgcaggggaaggggcggttttgggggaaagtgcaacgtgtctctgactgcatctcctctccccagcttagaggtgttaagatcaggagtcttctgcccaattcctctcactcctggctgtctaaacagtccttccatgatgttctgtgtccacctgcattcgttcatgtgacagtattcttatttcagtcctgccatgagcaggcacagtgagtgcccggtctcctctctgctcttgcttatgggaaggggatgctggggagcctggtggcccaactgagcttcgccggtttcccatccatccagctgccctacttgattgatggggctcacaagatcacccagagcaacgccatcttgtgctacattgcccgcaagcacaacctgtgtgagtgtgggtggctgcaatgtgtggggggaaggtggcctcctccttggctgggctgtgatgctgagattgagtctgtgttttgtgggtggcaggtggggagacagaagaggagaagattcgtgtggacattttggagaaccagaccatggacaaccatatgcagctgggcatgatctgctacaatccagaatttgtgagtgtccccagtgagctgcatctgacagagtttggatttggggccaggactcttgcattcctgcacacactggtcttaagtccctggtaccattcatcctccaagtgctttcccatactatcagcagttattctcacgactccaatgtcatgtcaacaaaagcagaggcaattcccaccaaccttaggacacgatccaggcatcccagggtagaaattcagttcctgtatggtaaagtttgtgttcagaatctccttcatcagctctggcctctgacttctgtcctgggtcatttctgtcagccagttcacatcacctgcctgctcctagaatatgcagactcaagtagaagactcaggaatgtaatggcaccctcgaattgcatcttctcctcaacagttttctgagtgctgtcattgacatgcacagggatctgcgcattttcataacagacagctcagaggcagtcagagggcctttattcctctccctccttcctttcaacttgaacttctcatctccctggaaactagtcaatgttcattgttttcttctgccaccccattagaaggaactttctactttccctgagctcccttagttctttgcatccttgattctgctggtctggatccagaggctgccaggtgcttgggcgctcctggggctgacccagaggctattgggaggtcagtgaggacagattcagggacagcatctcattcctctctgccttctgatcagtttagatagggtctggcactcagtcagagtctaataaatgctgatgtatccaattgaagcctgggcactgccccagttccagcttggggaagatggctgcttgcccatggccagcctgggccgtccacagccccggggaggccacgtctgtgcagggagcttttgtccgagggtggtgacagctgttttctgcctcaggagaaactgaagccaaagtacttggaggaactccctgaaaagctaaagctctactcagagtttctggggaagcggccatggtttgcaggaaacaaggtaaaggaggagtgatatggggaatgagatctgttttgcttcacgtgttatggaggttccagcccacatattcttggccttctgcagatcacttttgtagattttctcgtctatgatgtccttgacctccaccgtatatttgagcccaagtgcttggacgccttcccaaatctgaaggacttcatctcccgctttgaggtgatgcccccatcctcctttctctttgatgccccttgttccgttacctcctttcagatgttttcccagtcctggagctacacacagaataactcgcatgtattgagtactggtttcatgccacgaaccgtgcccagcacattatacctattgtgtgaaatttgaattttataacattccagtaaggtaacagaattatctcgcccattttagagataaggaaactaagaatgagagggtcagtcctttgctcagggtcccagagctagtggaggctgtgctgggctccctgtgagcctctggatctatgggtggcagtcagggctctcccatttgtgacagaagaaaaagccttaggcttcacctagcctgggtttcacagcccaggacactttggaagaggcagagaacttcatgaccatagatggagctggcaatagtaggactgacacaacggtgacattgatgtctagtactgaacccacaggcaatattcatagctacctccagaagctttgcatgattggaccccagtgtggggaatcctgagagccagggctgtggctgtagctggattaaggtacatatgtgggtgtccctgttgaaggagtatatgttgaaatgcccggtgctggggcacttccttactccacctctattctttttttttttttttttttttttttgtgctggagtcttgctctgttgcccaggctggagttcaatggagtgatcttggctcactgcaacctccgcctcctgggttcaagcgattctactgcctcagctgcacgattagttgggattacaggtgtgcaccaccacgtctggctaatttttgtatttttagtagagatggggttttgccatgttggtcaggctggtctcgaactcctgacctcaggtgatctgcccacatcagcctccctcagtgctgggattacagatatgagccactcctcttcctcttttttccctccagtgttccacgtgttccccctgtgagatgagtagcatgctgattttactcctattcaccgaccttctctgcatgaggcagggagtgaggcacagtgggagatgtatagatgactgccccatcctggaaatgagtgcagtgagagggctgcaggcagagcagcctgtgaggtgtgtgtggcaccacctgggtaccaggcccggggcctgcccctcactcacggggaaccatccctcacccttgctgatcttgtttcagagcacaaatcctactttagtacagatctgggaatttgaggcattagtccaacgggcttctgagcctagaatctgtttccctttcccatcaagaaatctgcttgctcagctagttcccatcagctctggttctggtccaggcttagtggccttggagttatgtaagaggtggtgggaagggaggggtggaggagagctgaggtctatggcctatgacatgccagggtcaatcagtttgagaacaggcagtcctggatcttttttttttttttttttttgagatcgtgtcttgctgttgcccaggctggagtgcagttgcgtgacctcggcttactgcaacctctgcctcccgggttcaaacaattctctgcctcagcctcccgagtagctgggattacaagtgtctatcaccacgcccagctaatttttctatttttagtagagatgggctttcaccatgttggccagggtggtcttgaactcctgacctcgggtgatccacccacctcggcttcccaatgtgctgggattacaggtgtgagccggatgtttttgaataccttatctgggcattcaatcctggtaagattgtgcacagcacatctgagtatcatgtagcctgatctgcagcagggctggagatgccatgggttagggcacagtgagattttgctcaggtattagatggagaactttggactttctgctttaaggggaatgtttagagcctagtctcgcctttgattttcttgtgcactgccaccccccattccactttcatccaggttttactgagacattgggtgagtgtgttcagagcccctttgttctgctggaggtcccttctgtgtctctatacccagacaagccaagagcctccctgtggaaaaggagactgtttgtgcagtcaaggagtgacagggcctggtgtgaggggtggtggggcagaagaagaagagaatttgtcaggaagaggccagaactggagagagacagaaccaggctacactgcagttctattccccttactaggtatttaaatgtaaggaagttgctgaacttctgtttcccacatgagaaatggtgataatagattcagccttgcagagcagtcgagtgggttttctaagcttacgttgtaatttctcttgggtacagagcacccagcaccgtgtagaatcttcataagtgttagctgttactgtggtacaacattacttaaaggaagttggaagagttaactccgcaaatctggggaccctaagaagctgtgtgatgcctcagcacttgagcccacatggaaaggctgtggccagggccctgacctgctgtgtctgcagtggggttgtcccagccctcatgggcagctgaccttgagttctggccttattttcccccctctcagggcttggagaagatctctgcctacatgaagtccagccgcttcctcccaagacctgtgttctcaaagatggctgtctggggcaacaagtagggccttgaaggccaggaggtgggagtgaggagcccatactcagcctgctgcccaggctgtgcagcgcagctggactctgcatcccagcacctgcctcctcgttcctttctcctgtttattcccatctttactcccaagacttcattgtccctcttcactccccctaaacccctgtcccatgcaggccctttgaagcctcagctacccactatccttcgtgaacatcccctcccatcattacccttccctgcactaaagccagcctgaccttccttcctgttagtggttgtgtctgctttaaagggcctgcctggcccctcgcctgtggagctcagccccgagctgtccccgtgttgcatgaaggagcagcattgactggtttacaggccctgctcctgcagcatggtccctgccttaggcctacctgatggaagtaaagcctcaaccaca

SEQ ID NO: 141 - DNA, 6487 bp, Homo sapiens
ggcaagggacggagaacggggcggaggcggagtcagggcgcccgcgcgtgggccccgcccccttatgtcgggtataaagcccctcccgctcacagtttccctagtcctcgaaggctcggaagcccgtcaccatgtcgtgcgagtcgtctatggttctcgggtactgggatattcgtggggtgagtgccgtctcaacggtagagccgctcggtcaaagagactgacgcggagagggcgggtctctgggtccgcgatctccagcaggagcagctctacgcgggagccttttcgagctgccgagccacggatgtcgacccctgcccagcctctgggatcgcgggccctgtggggaggggcggaggagaccacgccggagccgggcctaggggccgcttaaccaccgccccggcaggacgcagggactcggcagccccgggccggggaacgttagcgggcgggggttgggaatgggtgggagctgcgcagtcgctgaaccgctgtcttccccagctggcgcacgccatccgcctgctcctggagttcacggatacctcttatgaggagaaacggtacacgtgcggggaaggtaatgccgctccgcgtgcccgtgcagccaagctggccctccacctgccctggtcttcttacgcccagagggtggtggcgtcgcgccaaggccgggtgggacgtttgccccaatctgggtgaatagagacacatcctttatctggaactgggggttctctttttaacatagcccaaacccgtcttaatgcttaaccaaatagggctcagaggctcaatggttatgcttttggggcctgggaatttgaggtattgggaccaagtcatttctttagatcttttgctcttgtcaggtggggtattaaggaggttgggtcccacttaattccgtctcttacagctcctgactatgatcgaagccaatggctggatgtgaaattcaagctagacctggactttcctaatgtaagtggctttagtagaggtggcgggcagaagggaaagccttcaagtatatccatccttgcctctctcctgcctggtacagaaggatgcaaaataggggatcttaacccggatagaataaatagaattcaggggtccttgaactggatggatatgtattttcattcccattaaccactagcaaaagttatttccttttattgtgaagagagacaataagtgacattggttattagccatgtctgtcactttgtcactagtagaaatcaggtattttcttttttgtgtgtttcttgttcttttgttttgagacagtgtctcactctgtcgctcaggctggagtgcagtggcgcaatcacagctcactgcagcctcaacctcccaggctcaagcagtcctcccacctcagcctcccaaggagctgggactacaggcacacaccactatgcccagctaatttttgtatttttgtaagagacggggttttgccatgttacccaggctgatcctgaacttctgggctcaaacagtcctcccacctcggccttccaaagtgttgggattacaggcatgagccactgtgcccagcctgaaatcaggtagtttcatattctataacatgcgttgcagatattttaagtgatatttatatacatgtaagtaaatatatacatataatgttatttactttgagattatgttagtcattacatctgcttgctatttaatgcactaataggcacatgttactcttatttgaatttttaaaaatattttttgattgtgtaaattatctattttgcttcatgcatttaacaactttattctgagaaaaggtccatggcatgcacatacactcacacatacacacaccaatttaagaacccctgtctagaatcttgtggacccagttgctaccttctacttattttcttttttctcctaacacagcatcttctcactcttgttcactgccctgcaagtgttcttttcccctggagagagaggtagggaatcaagagagaggcaggttgttcatttgtcctgtccttttcctttcagctgccctacctcctggatgggaagaacaagatcacccagagcaatgccatcttgcgctacatcgctcgcaagcacaacatgtgtgagtggggtagggctggtgagggaccccaggctggtagtttgtctgagagtggatgatgccaagggtgatttgttgtcatttggcctacaggtggtgagactgaagaagaaaagattcgagtggacatcatagagaaccaagtaatggatttccgcacacaactgataaggctctgttacagctctgaccacgtgagtttccttagcacacatctgctgaatggagtatcagaaaaaggggtatttaggaacccaagggttatctctgttccattctgctgctgctaccttcccaccaatccagattgttagaataagaaacagaacttatattttttggtttgttttgtcatgtaattctggtgctggtgcctcttctttctaaactcctctttccccaccctgccatcctcaagtgaaggcaatgagaacccacctagagaaggggctactaagtgtccatcactggcctgtgccctgattaactacaaagatgatcaccactattctcattctgttttttcctctcaggaaaaactgaagcctcagtacttggaagagctacctggacaactgaaacaattctccatgtttctggggaaattctcatggtttgccggggaaaaggtaggaagaagggaaaagaagaggatacttctctatctctgcaggctactactcctcagacctaagcatcttattgcttttcttctagctcacctttgtggattttctcacctatgatatcttggatcagaaccgtatatttgaccccaagtgcctggatgagttcccaaacctgaaggctttcatgtgccgttttgaggtgacgtttcctgcacctttctcttataaaaacactcacaggctcccctgggacctgcaggatcccatagtggaggattcttccccggcttttgcctaatgggatcaatggttggacacctctagacctttaagtcttgggaagagcctaacttctataccttggaggcactgtctacaaaaaaatggaggaggtagacgcaggcaacacgtgaatgttgctgttctggtatgcatctgttggactgggttggggtcgttataagatttggtgtattttcctttcaggctttggagaaaatcgctgcctacttacagtctgatcagttctgcaagatgcccatcaacaacaagatggcccagtggggcaacaagcctgtatgctgagcaggaggcagacttgcagagcttgttttgtttcatcctgtccgtaaggggtcagcgctcttgctttgctcttttcaatgaatagcacttatgttactggtgtccagctgagtttctcttgggtataaaggctaaaagggaaaaaggatatgtggagaatcatcaagatatgaattgaatcgctgcgatactggcatttccctactccccaactgagttcaagggctgtaggttcatgcccaagccctgagagtgggtactagaaaaaacgagattgcacagttggagagagcaggtgtgttaaatgggactggagtccctgtgaagactgggtgaggataacacaagtaaaactgtggtactgatggacttaaccggagttcggaaaccgtcctgtgtacacatgggagtttagtgtgataaaggcagtatttcagactggtgggctagccaatagagttgggacaattgcttactcattaaaaataatagagccccacttgacactattcactaaaattaatctggaatttaaggcccaacattaaacacaaagctgttgaaatattgatgaaaatgtaagaatttttgtgaccacggggtaggagaagtttctttaaagacgtaaaaagaaaaaaaccataggctgctctgcctgtggagtagccattctttattcttttactttttaaaataataacaatcacaaaggaaagatttgccaattgaataggatcaaattctacaacttttcctaaggcacccacaaataaatgacaagtgagacaaaaagcactagtataaagattatataaagacctataaatcattaagacaactgagtttttaaaaatggacaaaatccatgaacaatttataaaatagaaatatagccaaaaatgtctaaaagatgtttatgatgtaaggaattatcaattacaacagtgagaaaccatatttccttctatccgatgagtaaaaagtttctaaagtgttggcaaggcttaggaaagtgatatgcatttcctgctggtcaagttgtaaattagtatagctactttggaggacaattgtaaaatttaaatcatatcctatgacccagcaattccatgctataaaaactcatccatggccgggcttggtggctcacgcctgtaatcccagcactttgggaggctgaggtgggcagatcacgaggtcaagagatcgagaccatcctggccaacatgatgaaaccccgtttctactaaaaatacaaaaattagctgggcatggtggcatgtgcctatagtcccagctactcaggaggctgaggcaggagaattgcttgaacctgggaggcagaggttgcagtgagccgagatcacgccactgcactccagcctggctacagggcgagactctgtctcaaaaaaaaaaaaaaaaaaaaaaaaaaaacattcaaagagacatatactaagatgttcactgtggcattgtctgtaatgacaaataagtggaaaccgtgtaaatacctgtcaatactatggagtaccatgtggcaacggaagaatgagactgaactgtgtgaactaacatgcaaagatccccaaaacaggccaggtgtggttgctcacagctgtaataacaacaccttcagaggctgaggtgagaggatcagttgaggccaggagtttaagaccagcctgggcaacatagtgagacccctgtctcccaaaaattttttttaattagctgtgcgcaattgctcatgcatagtcccagctacccaggaggctgaggtgggaggatcacttgagcccaggaatttgaagctgcagtgagctgtgttcttgccactgcactccaatctgggtgactgagcaagaccctgtctcttaaaaaaataaaaaagatctccaagcatagagaagagtctggagggaaacaccaaactcataacagtcttactgcaggcaagtgggataaaggcccagactccatggtggaagttaaagggcatttccaagttaaggctaagacttgcttttctaactaagagaatgtgctcatgcattgcttgtgtagtagaaactagtttttagaaaagaaagcaaacttaagaaacactgactcctgtggagatgacttggcaccactctcctttcacagagcagagtctgaatagtcttcagagataggcctgtgggccagattgccatcccctatggaccagaagccaaggatctctctagtgatggtcagagggcccaaatggcagggatacccagtgatgtcaggaggaatagtacagacagaaggtgctaagcagacaattcaactgccatgttttgccaccccctgtgagcagggattaggtgttcaggccagtatcttgggcatgggggagcctttggccagaagaggtataaagctcagaagtttttcagtctgataactattgatataatttccatagtgtgagggagcggtatgctctacccttgtgtatttaaggcaggacagagaaattgaggatgcccctggggctagatcgatgatatgaccagaaatcaaaaagggaatgcattatttattgctgtgtaacactgttaagagaggaggtagttaagggatggataggcacatagagagggaaggtctcaggagaagggatagaaaggaactatgttcacaagaacaacggcaagacagtgcctatactgcctctacagttaataggaaaaacggaagaagttacccttaagctaggatgttgctcagaagtgaccatcccaactttggtgcgggcacaataaatcagcctaaatgtccctaatttaacccagctcattataatgtcattaaacatgacattagcattgtggttttagcacccccatgggttttgcttaggcactcatgggtaataaccaagatggagtccctttggcaaaacttaggcatgcacagctgtagtaccccaagaagaaaatgttacttctctcatctgggcaaaacccacagaagacttcccagcttctgccacataaaagacacagaacacagacgccttactggcaacctgctttcaagacccctgtctttgctgagagctttcctttttcccaataaattctactctgccctactcactctc

SEQ ID NO: 142 - DNA, 2838 bp, Homo sapiens
ggagtttcgccgccgcagtcttcgccaccagtgagtacgcgcggcccgcgtccccggggatggggctcagagctcccagcatggggccaacccgcagcatcaggcccgggctcccggcagggctcctcgcccacctcgagacccgggacgggggcctaggggacccaggacgtccccagtgccgttagcggctttcagggggcccggagcgcctcggggagggatgggaccccgggggcggggagggggggcagactgcgctcaccgcgccttggcatcctcccccgggctccagcaaacttttctttgttcgctgcagtgccgccctacaccgtggtctatttcccagttcgaggtaggagcatgtgtctggcagggaagggaggcaggggctggggctgcagcccacagcccctcgcccacccggagagatccgaacccccttatccctccgtcgtgtggcttttaccccgggcctccttcctgttccccgcctctcccgccatgcctgctccccgccccagtgttgtgtgaaatcttcggaggaacctgtttccctgttccctccctgcactcctgacccctccccgggttgctgcgaggcggagtcggcccggtccccacatctcgtacttctccctccccgcaggccgctgcgcggccctgcgcatgctgctggcagatcagggccagagctggaaggaggaggtggtgaccgtggagacgtggcaggagggctcactcaaagcctcctgcgtaagtgaccatgcccgggcaaggggagggggtgctgggccttagggggctgtgactaggatcgggggacgcccaagctcagtgcccctccctgagccatgcctcccccaacagctatacgggcagctccccaagttccaggacggagacctcaccctgtaccagtccaataccatcctgcgtcacctgggccgcacccttggtgagtcttgaacctccaagtccagggcaggcatgggcaagcctctgcccccggagcccttttgtttaaatcagctgccccgcagccctctggagtggaggaaactgagacccactgaggttacgtagtttgcccaaggtcaagcctgggtgcctgcaatccttgccctgtgccaggctgcctcccaggtgtcaggtgagctctgagcacctgctgtgtggcagtctctcatccttccacgcacatcctcttcccctcctcccaggctggggctcacagacagccccctggttggcccatccccagtgactgtgtgttgatcaggcgcccagtcacgcggcctgctcccctccacccaaccccagggctctatgggaaggaccagcaggaggcagccctggtggacatggtgaatgacggcgtggaggacctccgctgcaaatacatctccctcatctacaccaactatgtgagcatctgcaccagggttgggcactgggggctgaacaaagaaaggggcttcttgtgccctcaccccccttacccctcaggtggcttgggctgaccccttcttgggtcagggtgcaggggctgggtcagctctgggccaggggcccaggggcctgggacaagacacaacctgcacccttattgcctgggacatcaaccagccaagtaacgggtcatgggggcgagtgcaaggacagagacctccagcaactggtggtttctgatctcctggggtggcgagggcttcctggagtagccagaggtggaggaggatttgtcgccagtttctggatggaggtgctggcacttttagctgaggaaaatatgcagacacagagcacatttggggacctgggaccagttcagcagaggcagcgtgtgtgcgcgtgcgtgtgcatgtgtgtgcgtgtgtgtgtgtacgcttgcatttgtgtcgggtgggtaaggagatagagatgggcgggcagtaggcccaggtcccgaaggccttgaacccactggtttggagtctcctaagggcaatgggggccattgagaagtctgaacagggctgtgtctgaatgtgaggtctagaaggatcctccagagaagccagctctaaagcttttgcaatcatctggtgagagaacccagcaaggatggacaggcagaatggaatagagatgagttggcagctgaagtggacaggatttggtactagcctggttgtggggagcaagcagaggagaatctgggactctggtgtctggcctggggcagacgggggtgtctcaggggctgggagggatgagagtaggatgatacatggtggtgtctggcaggaggcgggcaaggatgactatgtgaaggcactgcccgggcaactgaagccttttgagaccctgctgtcccagaaccagggaggcaagaccttcattgtgggagaccaggtgagcatctggccccatgctgttccttcctcgccaccctctgcttccagatggacacaggtgtgagccatttgtttagcaaagcagagcagacctaggggatgggcttaggccctctgcccccaattcctccagcctgctcccgctggctgagtccctggcccccctgccctgcagatctccttcgctgactacaacctgctggacttgctgctgatccatgaggtcctagcccctggctgcctggatgcgttccccctgctctcagcatatgtggggcgcctcagtgcccggcccaagctcaaggccttcctggcctcccctgagtacgtgaacctccccatcaatggcaacgggaaacagtgagggttggggggactctgagcgggaggcagagtttgccttcctttctccaggaccaataaaatttctaagagagct

SEQ ID NO: 143 - DNA, 24827 bp, Homo sapiens
ttcggtggcctctagtgagatctggaggtgaggcgggcggtgaccgagaagaggggcaggggcggcggggagcggggcggagatgggtgggagcggggtttgggctgtgttggtggcaattctggagcttccctcggccctgggaagtggctaccggcagctcctgcggacctggagggggctgcggttgcgctttgtcggtgtggcagctcggacccgcggggactgcaaggaatgtccttgaggcccggcaggccgagcggcggccggcatcagtgccggagtaacccggggtcccggggtgggcttgagaggcgggcggcggtctggcctcttcgtgactgcggtcatcatcggtggacccgcggggcgtagctgcgttcatcgtccctgttcagtcagagtaggcagtgctggctgcacggtcacgaaaatcggggcggaaagggtgtcaggcagggtgacctcggaggcccctggattcgagaaatgctaggggtctatggggctgtcgggccggcagctcgcagggcagacgggagaagcgcctgcatcccgggatccgggcattcacgcccaggaactgctgttcgttagcacctttcttttaggtgacgggaaagatctctgtaaatactgctgactaacttagaaccatgaaagaaccgtggattggtgtagatgtgtctggttatttacaggagaacggcttgagaggatgcggagcccaacgtggggattcgcacaatgactcaaaagattcttctccctctttttttttttttttttttggtaaggggtgtagtctccttggtgctgatattcttttaggaaaaatgtaccttggagatacaaatatagaacagttaatttctgcagtaggaggaggtcgatgtactccattcttaagtagtcgtttgaaatatttcaggatttgaggatattccttcttagacatggtcctgcagagtcgtaggaagcatttgtttctgggctatactaaatgtgcatgatttcggcgtcccacaaggtagagaatgtactttttgtttacttatgaatttattttcctctccatgcagtgaaaggcattttgcaatttagagataatctagcaaagacctggacagtactttggggataggctggattttgcaggcctgctttgttgtagtgttcttccagaacttatgataaacttggtggccaaaacaaatgggaattagtaacatgaaggttaaacaaaattgcacataggttacagcattaacatgaaaattgtcgggtatgtgggataaccatttcaagataagagtgtgagtatgcgtgcatgcacacactctttgtattcctttatggtctagtttctagactatagatagccacattatggaattacatggtctacttaggttgacccatgtgaaattgccagtatttaaaattcaactaacctacaaaaatagcagtttcatatgattccatttaacacttatctttgtcagagaactttggagctctagcttcataagtgaatgaagagaatagatatgacttaaaaaacaacatgtaatagaatgtgagctaattgggtatagaatccagatttcctgattgccagtgcaagattcgtttttttttttttttttttccttctttctggaataccagcttgagcagcagaatgctagatcttgttgggattgaaaatgactgccatataagacgcagttcttggcttcaaagagacaaaatgtacacatttattaatttgagaacactgtgagatagtatataatcaaatactggaatgtgtaatgcaggcggagtgctgagtaggaggaagtaagatgccaaaacatccttttctgcagttggccatggtaggtggcttctgtagcagattggattgacatttaagaattatccattcttttaaagaatctgtaaaagtttgcagcatactttttagtctgaataagtaaggcataccttgcctatttgtttctttaagtaaaattaatttttggccgggcgcggtggctcacgcctgtaatcccagcactttgggaggccgaggcgggcggatcacgaggtcaggagatcgagaccatcccggctaaaacggtgaaaccccgtctctactaaaaatacaaaaaattagccgggcgtagtggcgggcgcctgtagtcccagctacttgggaggctgaggcaggagaatggcgtgaacccgggaggcggagcttgcagtgagccgagatcccgccactgcactccagcctgggcgacagagcgagactccgtctcaaaaaaaaaaaaaaaaaaaaattaatttttattgcagcattgcataaatactgtcaacttaatttgcaggagctatcctgtagcctgcttgtgacatttgcaactgctgatgaaggtggacgattgaattctatggcatgtaaatgctttgcgtaatcacagggcaacggggaggatgttcctgagaaatgagattgtttataattatggttacttttgacacaccctcataagattgctcagtttgtttccaaataggtggagttctctgtgtttaggggcggctgacagaatcatgtgtaatttttttccttgaatattgcaaagatgactttacacctaggaaaaaaagtcccagaattacaatgccaccataaaatcttttgagggaaaacataatgtgtctaatgtataattatgggtttatgatgttaaaccaatttgttcacaagttagtgttccttctgggttgcagctaagattttaactcaaatgaattaactttttaaaacaatgaatctgattgacataatgaggaataatctgagctgaagagtttttttttcagggaaagagggttagaaataattttgacctaattttgaaacatgtagttaatttactttctggaactttgatgctaattgatcctttagaacagttggtagagttgtgttttaaatgtaggaaagaaattatgtgatagaataccatgatgaaaatctagccttttagtgagtgagtcttttgtttataattaagtagagttcaaatctaagatttgattaaagatttccaatacttaaaagtccaagtacctgctaatttaatagaaagtattttgttgctgttgttcattttccaggatagttccaagttgactgtctctaatctgaagatctgaaatccgaaatgctccaaaatctgaaatttcttgagcaccaacctgacactcaaagaaaatgctcattgcagcatttggagtttggattttggattagggatgctaagctaataaatgtaatgcagatattacaaaattcaaaaacatccaaaatctgaaacgcttctggtcccaagcattttggataaaggatactcagcctgtatgtaaaatgtttctccttcccgtaccccattaataagttccctgaatgctctgcatttagccttaaactagagggcatgggttacatccatatctaggtgccttaaaaaaaagtcgtctttaggtctgtttcaagatgtgtcataaaatacatgctactatagcttaagaatttaagccagcatttgttgagcaatgctgtatatgagtgcaaggtgctggagggtaaattgatgaataagactcagggtggaaggttgaaaaagcatgagtaaacacaggcaggtacatgccacatttatattcctttaggtactgccagctttttaaaactgtgacccacagtaggaaatacacgttaatttaaaagccagacacacacttatataggtatagtttcttgaaacatagttttaagaaataatacctacccatactacctggcttacccaacagctattttttataatattgttttctattttattttatttaaaaatgtttgttcttaacgacaaaattgatgtcatgatgtaattgatgcagttgttgtggatcaacagtttgaaaactgtttagctagtggtgtggtatgtctgaaatgtagagaacatggagtgatgcagtgagagatgacacttggtatttgctttggttccttaaagctgctctttttttttttttttggtctttcccctaaccctttataaatagattaatgctttctttcacttacttgattgcctttttatagtctgtcttcaacagatgaatcacttttatttattactaaatgtgagattcatttgaattcttgctagagtggcagttaatgagctttttaaatctttttggttgatttttgcaggttactaatatgccttatcacaggcattgattttagtgaaagaagtaagacttgcaggtttatttgtggagaccaatggtaatagaagatttgttttcaaaatcagaatgtcataattattatttagcaaacaggaaatttagtcatggtagtcagtaaatcaaaatcttctatatgttcttttgggaatttttttgaatgctatatacagatacttcagccagtcatcctcttctagtactgttccagcttttgattagttgtgaaagtttggagcttttcacatctaatgcttttccattggtcttctagcactattgttgatgaatctgctagaagaaaagcagccaccacagcaaaattcttaaccctgttttattaatgtagaaacatctatcagaaaagactttttttctgttgacagcaatgttaggaaggtttattaaacatccttttgctagtgacattatgccatatgttctatggaatgaaaaagtacaagaggtccctgcccttgaggatcttatcaactaacatgatttatagcaggacactcaataagtggattcttgggtgtttaccttttgtgtaatcagaatgtagatgatgaagaagatacttaacatgcattttatatctaggtaattagaaaatgtgaatagctgtttctcacttgtgttttctgcttgattgctcttctacttgcaaggcttaggtaataaggtcgagatacttatctggtttgatcttaaatgtttgaattcatataatttttaagaaatggctgctttaaagttggttgccagtaagtaataaaggatttattgtttgagtgaagaagaaataacatagttctcttaattttataattattttccagaattataaggaacagtatcaaatagtcatatgtatgggacactgtgcatacaaagcagggtttatagcacacttttccttaaaatcttttcctaaaaatacaatgagctgtatactaagtgttcacccttgatattccttccaggatccaaggattctgtagctacaatgttgtcaagactttttcgaatgcatggcctctttgtggcctcccatccctgggaagtcatagtggggacagtgacactgaccatctgcatgatgtccatgaacatgtttactggtaacaataagatctgtggttggaattatgaatgtccaaagtttgaagaggttagtgaagttaatttgatactgactaaagtaaattacattttcaatttttgaagagcccttaagcccctatagggagcacataatttttaaaagttagagtaaaatatttattttagtattttggaacttacctcaaatttctgcttacatggaatgcactggaaatgctcttattttgctttgtctttacaaatgaatgtaattgactttatttgagaaatacatcttttataagtgactaatagtcaaaaatgattgtgggccgggtatagtgactcatgcctgtaatcccagcactttgggaggccaaagcaggagaattgtttgagcctaggagttcaagaccagcctgggcaacctggacaacatagtaagacccagtctttaaaaaaaaattaaaggccgggcacggtggctcatgtctgtaatcccagcactttgggaggccaaggcgggtggatcacgaggtcgggagatcgagaccatcctggctaacatggtgaaacccgtgtctctactaaaaaatacaaaaaaattagccaggcatggtggcgggctcctgtagtcccagctactcggaaggctgaggcaggagaatggcgtgaacccaggaggcagagcttgcagcgagccgagatcgcgccactgcactccagcctgtgtgacagagcgagattccatctcaaaaaaaattaaaaaattagctgggtgtggtagcatgtacctgtagtcctgctactcgggaggccatggcaggaggatcccttgaacctggaggttgaggctgcagtgaactgtgattgcaccactgtactctagcctgggtaacagcatgttaccctgtctcaaaaaaaaaaaaattgtggtgatgtattggcttaccacagtggtttgattaaaagttggatttaatttttgatttgtaggtttgatatttttattggacttgtattgtgcttacatttatgttctcatgactatataaatgaattacacatgcaaaataaaaattcttagttttgattacttattttaaaagtcaaagctaatggaatttccttttctttctctcctattaggatgttttgagcagtgacattataattctgacaataacacgatgcatagccatcctgtatatttacttccagttccagaatttacgtcaacttggatcaaaatatattttgggtaatagttttacatatttaacttctggtgtcatcagatttttgatttgctgtggaaataaacctgttcattcaaatcatgtatttggaaatatgtgtattgctgaaagtgtgctgcatgcattgaatagtttccttattattggcaattagacattctgaaatttgagaccttaataatttggagtaaactagtattatctcagaatgctgtgtgacactgttattatttgtgtagtaaaggataaagtttttttagtattgaacttttgtcattttaggtattgctggccttttcacaattttctcaagttttgtattcagtacagttgtcattcacttcttagacaaagaattgacaggcttgaagtaagtatttaaaacctaaatatactttctgtcaaaatacattttaaaaaacttttcttccccatgctgtaaaggtacattttcaaaagttaagaaaataaggggaaatttttttgtataattttactattagctaattttaataactattaacattttggcatatatccttttctactgtttttatacttaaagaaaatatctgatatcatatatattgttttataatttctttatgcttaataatagtttatcaacatctttccatgtcccttttttttttttttgagatggagtttcgctcttgtcacccaggctggagtgtaatggcacgatcctggctcactgcaacctccacttcccgggttcaagcagttctcctgcctcagcctcctgagtagctgggattacaggcacctgccaccatgcccatttaatttgtgtatttttggtagagactgtgtttcgccatgttggtcaggctggtgtcaaactcctgacctcaagtgatccgcctgccttggcctcccaaagtgctgggattataggcgtgagccactgtgcccggcctccatgtccttaatgttaaactaaattgtttgtaatggctatatgtattctcttctgtctaaacgtcttgtagtttattaatcatctaatgttggactgttaggttatgtaattttttttattaataacaacactgtgatgaatgtctttgtaacgaaatttttgttcatatttgtaatcattttcttaagatacattcctagaagtgagacagtggttttgctttttttagagctttgcttttttttttttaagagctttttagtgctattattgccaatttagtttacagaaagtttgtttagtttatccttccacaggtagtgatcaatgaaaatttttatatattccactttttttccctaatggtaatccaaggagatattttttactaaggatgatactttgatacaaaattatcaaaaggtgtttaaatgtaaatatacttacattttaacattaaaaatatttttaacaaatattttgagcaactactatgtttagctttgaggatgccaaagaaatatagggtatacttttttgtctgcagaaaggtacacatactacaggatcatacagtatggagggggaaaggttttgttctaaaaagaatttttttaaaatcatactttttcccgttaaatttatctgatcattttgttcttttccagtgaagctttgccctttttcctacttttgattgacctttccagagcaagcacattagcaaagtttgccctcagttccaactcacaggtaagtattatttataagataggaatgtgaatagtattccttttttcagtttacattaataggaaggattaatagcgtttcttcatagcacaagatttaagaattgcccaaagttttaagtttaattctcaagtcccaagactggtctccataagtgccccaggaacagtcccctgtatctaacaactcaattatgattctgtagctactggaatttggaattgcccccatttttctttttgaaagttttcagaacttatggtaataataatttttgggtaaataagagtattttcctagtgaaacacatcagagagcagaacaagatctaatggaagagaaacccagggtagattgattgattgattgatttgagatgtagtctcactctgtcacccaggctggagtgcagtggcgagatcttggctcaccacaaccttcgcctcctggtttcgagggattcttctgcctcagccacctgagtagctgggattacacatgtgcaccaccatccccggctaatttttgtgttttcagtagagacggagttttgccatgttggccagactggtctttaatttctgacctcaagtgatccacccgcctcagcctcccaaagtggtgggattataggtgtgagccactgcacctggccagatttatttttaaaccccttaaattaacactggcattatttcctattttaagtttcatcttaatgttcattagtcactttgaagaacctaaccattttaacaatattatatcagagtatcttgagtataaaatagcacacaattctgccctgattatttgttgatgaaagtgtgtgatcatttgaacatattaacaaggaaataagtttggttttattaatactaatatgatctcataaaatttgcaactaagcttctgtcatggtaggtaaaaatatagaatgttgtaggatttaattatgtgtgatttaaatgacagagttaatgcactacctcaaaggaatattcctaacaaatatcttattcagtggaaagggaatcagggcactatatgttcttttttaaaaatttggctgggcgcagtggctcacacctgtaattccagcacttcgggaggccgaggtgggcagatcacctgaggtcaggagctccagaccagcctggccaacctggtgaaacccagtctctactaaaaatacaaaaattagctgggcatggtggcgggtgcctgtaatcccagctactcgggaggctgaggcaggagaattgcttgaacccaggaggcagaggttgcagtgaaccaagatcacaccattgcacattgcactccagcctgggaaacaaagtgagactacatctcaaaaaaaaattttttaaaatcctttatattacaatcatactttgtatcttgaatacctgttagttttatcatattgtatattttactctttgaatagtaatttgatattaatataagccataggatgctctaacatttaaaaaagttgttctgtcccttgccttcattgatatgtttgatctgttttaggatgaagtaagggaaaatattgctcgtggaatggcaattttaggtcctacgtttaccctcgatgctcttgttgaatgtcttgtgattggagttggtaccatgtcaggtttgtaagcaatttttgccatattttaaaataggtatgtcgctaaagaggaaaaagaacatcttggatttgtattatttattgttaaattctgacttttaaattactcttaaaattttttattatattagtgtgtgggtatatctggcctgtttgctttggtggaaacttagcagcaggttactgatttatttttcactcctgccatcctctctttgtgttccactttgtgatatttttattcatttgatttcttttgtttgtttttttaaccaacattgcattccaaggttggtctggaaaacactttccagcccctgctgttacttagactcaattggtgacttggttctttgtgttttaattatcatgtagggagaaaagagtcaggaattggacagatctgagtaagattcacctaataaggtgattggaaatatttaatccgatagtaagcagtacatctcagcaagtacccagcattagcttcaacacatgtttcttcattcttaattggatagtagagaattagatattaatatcaaacataggacttcattatgtagaataaaaattacagactggcatggaaatttgccagaaggaatatattacgctgtgtgaaggtctcctaatcattaggattatattttatggctttcttataaagaccatacttggttaactactgtgtatttcctggtaccttagagccctcaatgagatgcctcattctttcagaagtaaattatctaacttttaagggggtaaattattgtcattagtttaggcctcttcagtagatagtatattaaaaatgtaatattgcttctaactttctgagagcaaattattatttatttattttattcaacaaagattttatttagcaaataaaatattttttaattttaaaaatttacttactttaaaatttacttttgggagtacaattttatgagttttgacaatgacatagtcttgtaaccaccactacactcaagaaaaaatgttgatcaggtgaaaatgtacttgtttgattttattcaagcaaaagaatatatgagaaggggattcgccaggaagtaatagttgggccatgaaaccatgggattattcattgaaataataatgatgtggaaagcagctgggcgatgagttttgtcatgatatggtcagagaagtagacaaaggaagtgattagatttgtggttggagaagacagtgagacatttacagctatacagaaatggtataattagagatttgggttacggtaaaaaaggacagatttaacacatattaacttggaagtaaccctttgaaaaagccagtacaaaaagaagaaagtcttagcttcttggatgtctgtggattggtgctgtttctttgtgtgtagagagacttatctggggacacagtaaggaagaatgcctggagagcatatggcaacaacatgagtgaatattgtgcagagagaaatagtagatagtcaagtcatgaaagcattggtcaagtatggttttaatggcctcaagtttgaaaagattatattcagctactatttaaaatgtagtttgatttataatgcttttgttattgtgattttgtagtctcttgaatttccacatttgagggtaatcgtggaattaaaaaaatacaatatatgcttgttctagtcagtcaaatgatatcttaaaatttaggtaataaaatacaactttgagtttttgtgagcagtttttataggacaatttaaatttatgtttcaaagcattgggaattaaaaaaatacaatatatgcttgttctagtcagtcaaattatatcttaaaatgtaggtaataaaataaaactttgagtttttgtgagcagtttttataggacaattcaaatttgtgtttcaaagcattgttatgtttgagcgacatcagaaatatgttttatattatactcaagtttatttgtaaagtgagggagaaggatttggtggtcatctaaggtctcttctagcctctataattctgttttctatttgagatcaccaaatgataccttaaacagttgtagtacaatatgtttgttaatttttagtcttaagttggcattttgtattatatcattttccaaacagatcaatgaaataaccaaaattataagaacttcagtaggcatcatagaggttatattgaaattagagtttgttggtacacaaaaaatattattttgaccttatatcaggactggcataactggcaggatattctacttatataaaaaatccttggttaattggcaaattgcttttctcctaacaagtgggattagatcaatagtgtcactggggttttgctctgttagagtagcctgtcctctccttatttaataataaggcactactgcttgacaaaaaggaattggaaacacatatgttttatcaattgtgtattaaacactaccattctgcctggcattgtgatatggggacatgagagaaggcaagagctttgctcttgagggacttagagttctgttgttattcctgctgtttcctaaggcttggcatcacctctaagttgctaattctatttccagtaagtggcaaggagcttaatgtactaatattttcatgttttgtccacctgcaggaagacaaatatatccttgtgatatatgcagcataaaaaataacgtagactttactagttgtatctttaatttttctctaaccaggggtacgtcagcttgaaattatgtgctgctttggctgcatgtcagttcttgccaactacttcgtgttcatgactttcttcccagcttgtgtgtccttggtattagaggtaagaccaattcttacatatggcactagtagaagagtaagatttctgcttacacagtttacctaaacagaatcaataccttctaatgtcacactgacttaatttgtagctttctcgggaaagccgcgagggtcgtccaatttggcagctcagccattttgcccgagttttagaagaagaagaaaataagccgaatcctgtaactcagagggtcaagatgattatggtaatgacatggttttcttcttcttttagtatcctcagttccaatctcattatttttaagatttctttttttctacaattttggcccattcaatgatattgcacccccttcttcctttttttcttaatgtgttcatttctttgaggctcctggtctttattagcccctctctcctaaacagactttttaagttcccccaccttatctctcgttgaaagcctgttctttggggtgttttcagtagttcagtggggtcactactttagttagttgcatagcaagcttggggctttttttttttcatggtaaggggaagctatgagagataatgtctggctgtccagttgctagggataagaaatttaagttctattgatatgcagaggatacattactttaaaaattttatttcagtctctaggcttggttcttgttcatgctcacagtcgctggatagctgatccttctcctcaaaacagtacagcagatacttctaaggtttcattaggactggatgaaaatgtgtccaagagaattgaaccaagtgtttccctctggcagttttatctctctaagtaagttaattgaaatctactttgtgatatattaatcataacactctatgctaatgtaagtttagattgtgtcctttacatttctgaataagattttaatttgctttcttttatttagaatgatcagcatggatattgaacaagttattaccctaagtttagctctccttctggctgtcaagtacatcttctttgaacaaacagagacagaatctacactctcattaaaaaaccctatcacatctcctgtagtgacacaaaagaaagtcccagacaattgttgtagacgtgaacctatgctggtcagaaataaccagaaatgtgattcagtagaggaagagacagggataaaccgagaaagaaaaggtaacttgttattctcttcgctttcaatccttcattgctttgtcaaaaagtagtctgttttcaaaattatgtgccgtgttgtgagatttcttttgatttcttgaacagttgaggttataaaacccttagtggctgaaacagataccccaaacagagctacatttgtggttggtaactcctccttactcgatacttcatcagtactggtgacacaggaacctgaaattgaacttcccagggaacctcggcctaatgaagaatgtctacagatacttgggaatgcagaggtgaggatgataacataaactccaatgtggcatttttcattacaaaggagctttttcaaggaagaaaaatctagtatctgctgaacactacagctaagttctgggcacggtgtaacatgactaacagatactatcttctttctttatttcacacaaccttgagaggtaggtacaattatctatttttcagatgagaacattgaggctccaatatgtttaatttcccaaagtagtacctctaggaaatgataaagctgatagcagggtccaagattttctgactccagagtcaaaactctttctagtttattactgtttatcatagagatgagtgactactgtattctcataggtgtgttgaggcctagaaagagtttaacacagagacaagtttcaaagatagaagaaagtttgtttttgttttgttttgtaagcttgatacccatgaggaagtttgcttttctttctgacatttgaacaggaccttctgcctacatgaccatatgaatctactcatgctttcatgcaaataatcatgttccatccatgtctgcttaatatggttctttcttttaaatatatgttaatacgtttattggtaaaatgcaattttttgccagctttattgaggtatacttgacaaaattttattttattattattattattattattattattattgttttggagacagagtgtcactctgtcacccaggctggagtacagtggcaccatcttggctcacagcaacctccacctcccaggttcaagcgattcttgtgtatcagcctcccgagtagctgggattacaggcatgcgccaccatgtctggctaatttttgtgtttttagcagagatgggatttcactatgttggccaggctggtctcaaactcctggcctcaagtggtctgcctgccttggcctcccaaagtgctgggattacaggtatgagccactgcatgcccggcctgcattcttcaatcatatgctttttagctaaacttagtcattgttctttaaatacagttcccaactctgggttcctattcttgtcatctgacatgtctccccctctccaggtgttcacacctttagggcaaatgctagcatctctatgaaacctacctcaattccgccaaacagaagtaacctttcttttctgaagcatccattatatagagactgtgcatttttaatggcagtcgtaccttgttgcttatatcacatttacatgaatatctccattattagacatcgggctcttagatggctaagtccatgtcttgagagggccttggatttcataggtgctcagtaaacttactaagagaatgaatgaatttgcattgataatacataaaccagctaatgtttatcttactattcttttgaaaaattaggctaatattagtgtttgcaaagaagatccttgaataaacccacaaaatggaattactggtaccagttttgtggagggtggtgattgtgagtgtgtgtgtgtgtatgtgtatgtatgtatatcaccaccacaagcagagtcaagagacagctaataaaccaagagaaaatattggcaatttatatttaaggctaaagggctaatctctaatatataaagagctcctacaaattgatgagactaaatttttatctaatttttaaaaagagcagataatcagtctattgtcaggaaaaaagtacatatggctcttaaaaatgtgaaaaggtgattaacttcatcctaagagaaatgcaaattaaaattgtacttgagatattttcactcatcagattggcaataatcccaaagtttaataacatactctattgaggttgtagggaaaggtcttttcttgtttttttgggtttttttttggtttggtttttttttttttgagaaggagttttgctattgttgcccaggctggagtgcaatggcatgatcttggctcaccgcaacctctgcctcctgggttcaattgattctcctgcctcagcctcccaagtagctgggattacaggcatgcgccaccattcctggctaattttgtatttttagtagagacggggtttctccatgtttgtcaggctggtctcaaactccggacctcaggtgatccgcccgccttggcctcccaaagtgctgggattataggcgtgagccactgcccccaggctggaaaggtcttttcttacattggtggtgagaaggcaattggaccgtgtttattcaaattaataaatttgtaaaaattataaaaatttataagattgtaaatgttcataccctttggcccaacacttgtgtgaatatatacccatatgtgtgcgtgtatatatatatatatgcatatttataatcatgcctaaaaacatctctggatggatacacagtgaaacagtggtacctatttatgtgtaggtagcaaagaactgggcagatggtagacagggatgggatgaagactttttgttatatctcttttaatatttagtttttaaaccatgtgaatatattgcctgttcaggatatcaaaaatagcaagtttactagagtttaaacaatagctgttatatctgacacacacttgaaaccttgctaaattcacatttatttttctttttatggtgtattagtgcaagcctgtctttgtattgtaaaatctaatgatacggtatttatattatttttgtttggcattttttgcattaaatgaattattttgcagaggtatcttttaattaaaaactacagtgatttaatttaaaaattacattattttagcttagcattgtttgtattaaatggtttataacatgaaatacagtccttcaagtcttctgtttcatctctctctctgaccacaatttcattttttttctccatttctttagaaaggtgcaaaattccttagtgatgctgagatcatccagttagtcaatgctaagcatatcccagcctacaagttggaaactctgatggaaactcatgagcgtggtgtatctattcgccgacagttactttccaagaagctttcagaaccttcttctctccagtacctaccttacagggattataattactccttggtatgttattttctcgattaagagagatttgctttgtatgtttttaatcttttttcttgattagtttcatatatgtacatagttttataaaacattttccttttaaatcattttatcctaattttttattctgcttatgatgtaggtcatagaaattaaaaatatatttcctgcttttatagtcattactcaaagattttagtattttaaacactttttaaaggtgaattaaacattttgtttaaaaagaatacatactaaaggattaagtttgaagatagttatactgacaagctgagataaaattttgtgcatttactatatagattttcatttggtgcctgactttaccttttaggtgatgggagcttgttgtgagaatgttattggatatatgcccatccctgttggagtggcaggacccctttgcttagatgaaaaagaatttcaggttccaatggcaacaacagaaggttgtcttgtggccagcaccaatagaggctgcagagcaataggtgtaagttggcatttatatatttgccagtttaaaaatacatcataagtaaggcaatgagaagagttttaaggacaattagtgataccttttgggtcaagcatgagcatttttgggtaacatgtgcttgcttctctaacatatactgtgtagcttggtggaggtgccagcagccgagtccttgcagatgggatgactcgtggcccagttgtgcgtcttccacgtgcttgtgactctgcagaagtgaaagcctggctcgaaacatctgaagggttcgcagtgataaaggaggcatttgacagcactagcaggtgtgtgagtggatttgtatgtacagttatatctatttgtttattttagaaccagtgtcattttctgtgattaccaaacataattgttaacatattacctgctaaagagcacataacagaatatcaactttaaagccattcatttaaaatgagtaatatttatgcttggttggggggaaaaaaagaatgttgattcaaatgaatagctccacagaggtaaattagtaagaaaaaaaaaaaagtgtgagctagtaattttgattagatgttactttgcctaggagagaactgtcttagaaaaaaagatttttcaaataggagagaaatattagtataataagacttacttcaaataaagaaaattaataaagtagcataatcaacacaaatgataaccatagtatagttcaagctaacacatttgtttttatgtgaactgtgtaagtttattaagaaataattgtgactgggcgcagtggctcacgcctgtaatcccaacactttggggaggccaacgcgggcagatcacttgaggccaggagttcgagaccagcctggccagcatggcgaaaccctgtctctactcaaaatacaaaaattggctgggcatggtggcccgcgcctgtaatcccagctactcgggaggctgaggctggagaatttcttgaacccgggaggtggatgttgcagtgagccaagatcaagccactgcactccagcctgggccacagagtgagactccgtctcaaaaaaaaacaaaaaacaaagaaataataataataaaagaataaaacacagtctttgcatcttttatttatagatttgcacgtctacagaaacttcatacaagtatagctggacgcaacctttatatccgtttccagtccaggtcaggggatgccatggggatgaacatgatttcaaaggtaagtgtaggcagagtatctgaaagtacttttattaaaatgaaagtacttttataaaaaacaaatcaggcatttgttgattggtattccttacatttgatagatttaatttagacttggcattacacatatcctgagtttacttaggactgggaacaatcttagtattgacatttcaaaactttatccagtcaagagaccacctttgaagctgacctcttcaagatttgtctttaagaacaccaatataatttcagtactttgggaggccaaggcaagaagattgcttggggtctggagtttaagaccagcctgggcaacacagtgagatgctatctctacaaacaataaaaaaaaatagttgtgcatagtggcacacacctgtggtcctcgctacacggtaggctggggcaggaagttagcttgagcctaggagcttgaggccagcttcggcaatgtagcaagaccctgactccattcatccatccgtctgtccgtccgtccgtctgtctgttttcaatttaggatattttctgcttatgtggggtttacagcctaataaacctatcaaaagtcaaggagcatctgtataagctttaaaattgccaataaacagtatggcagttcaacaacttaaacatgaaattaccatatgatccagcagttgcacttccgggcatatacccaaaagaactgaaagcagttctcagagagatatttgtacagctatgtttgtagcagcatttttcataatagccatgaattggaatcaaccttagtgttcgttgttggatgaatggacaacaaattagatgtatttgtatgtgtgtgtatgtatatgtctatataaaatggaatattattcagcattaaaaaggaaggaaattatagcacatgatacagcatggataaacattgatgacattatgctaaatgaaataaaccagtcacaaaaagacaaatactgtatcattccacttgaatgaggtgtctagaatagtcaaattcatagagacagaaagtagaatggtggttatcatgggtttggggaaggggaaaatgggtggttgttatttagtaagtacagagtttttgttttgtgagatgaaaagagttctgggagcaaagacatggaaccaacccaaatgcccatcaatgatagaccggataaagaaaatgtggcacatatacagcatgcaatactgtgcagccataaaaaaggaatgagatcatgtcctttgtagggacatggatgagcctggaaatatcattctcagcaaactaacacaggaacagaaaaccaaacaccacaccttttcacttgtaagtgggaattgaacaatgagaacacatggacacagggaggggaacaacacacaccgaggcatgtcggggggttgggggcaaggggaagagcattagggcaaatacctaatgcatgtggagcttaaaacctagatgacaggttgataggtgcagcagaccaccatggcacatgtatacctatgtaacaaacctgcatgttctgtacatatatcccagaacttaaaaaagagttctggggatttgttgcatggcagtgtgaatatacttaccactgtacacctaaaaatgggtaggatggtaaattttatgtgtttcaccacaataaaattatgtttttaattgccaataaatatgttttggattattgaggtatgagttgttaattgaattaatgccatttaattggaagtcattgggaagcttatttgtattttatgtaatataaagctcaacgacataagagtcgaatcacaagatcaactcttatgacccacttctctttacagacttcattacttggggttttaggtaacagctgaataactagaagatggaatttattactcattccccagtgacatataaatatgagtatttttattgaatatttttaacattatcatcttttatctacatctttttcaacaatgactacaaagaacttggttttcataccgagaaagaaacacattaggaatttatacctgaccaagaaagtaattgtgatggttaacaaaacagctgttacttttgtgctcagtttctttgaagtatagttattatacttagaaatatatcatagatacaaattcttctcataaggatgaaggatgaatatttcatgcagtttaatatgtgtgtgttttgggttcttgttaacagggtacagagaaagcactttcaaaacttcacgagtatttccctgaaatgcagattctagccgttagtggtaactattgtactgacaagaaacctgctgctataaattggatagagggaagaggaaaatctgttgtttgtgaagctgtcattccagccaaggttgtcagagaagtgagtgactggatggataatttatcttttttattttgtaatctttaattgtatttaaaaatgggggaaaggagtattaacattttaaataaagttaaatatatgggacagtgttttccatcaaagatgactgttgtaccttgcccatctgtctgtgtgtatcatccataggaacaaactttactgattttttttaattttttttattttttaatggaggacagggcttaaatggggccacatctaaactttgttttctggaggttcagaaagatagatttgggtaacattcccctgaaccttctggaggaacatctaaatgtacacagctctgttttgtaggtattaaagactaccacagaggctatgattgaggtcaacattaacaagaatttagtgggctctgccatggctgggagcataggaggctacaacgcccatgcagcaaacattgtcaccgccatctacattgcctgtggacaggtgagctctccagcctccacttctcttgtgttacgtctttctaagtgaaagaagtatattgtatattttttcttttcttgtttccaggatgcagcacagaatgttggtagttcaaactgtattactttaatggaagcaagtggtcccacaaatgaagatttatatatcagctgcaccatgccatctatagagataggaacggtgggtggtgggaccaacctactacctcagcaagcctgtttgcaggtatgatgtatcaggcatagagtccacaagcctagttctgactctctgggtttctctttctatctgagactatgtatcactcacctctattttaattggtcttttccaaactcttttgtcatatcagcctaatccattgtgtccaaataagcatgtttaagcttatgcttagataagaaagtagatgaagagagcaaatgaatgttcatctactgagttaagggtactgccagtcaggctgtgaatattatgttagctatggtattatgcactgtcaggtgtggctgtcaagtcttggaaagttagtgcttccagtggagtctagttctattctgatgccattacagttgccctgtttttagttgatttagtaagaaattggtcatgattttaagggtgaatcttgttgtgtctctccctggctacagatgctaggtgttcaaggagcatgcaaagataatcctggggaaaatgcccggcagcttgcccgaattgtgtgtgggaccgtaatggctggggaattgtcacttatggcagcattggcagcaggacatcttgtcaaaagtcacatgattcacaacaggtaagactcaaagatatatttaacatgttccccctatacttcaaaaaatatgcagtgtaaaaacttactattcatctactgtagttccaagttaaaattctacactcctgatatttatatattgctactttgtcattttctaccataggtcgaagatcaatttacaagacctccaaggagcttgcaccaagaagacagcctgaatagcccgacagttctgaactggaacatgggcattgggttctaaaggactaacataaaatctgtgaattaaaaaagctcaatgcattgtcttgtggaggatgaatagatgtgatcactgagacagccacttggtttttggctctttcagagaggtctcaggttctttccatgcagactcctcagatctgaacacagtttagtgctttacatgctgtgctctttgaagagatttcaacaagaatattgtatgttaaagcatcagagatggtaatctacagctcacctctgaaggcaaatataagctgggaaaaaagttttgatgaaattcttgaagttcatggtgatcagtgcaattgaccttctccctcactcctgccagttgaaaatggatttttaaattatactgtagctgatgaaactcctgattttgtagttaatttattaagtctgggatgtagaacttcaagaagtaagagctaagttctaagttcatgtttgtaaattaatacttcatttggtgctggtctattttgattttggggggtaatcagcattattcttcagaaggggacctgttttcttcaagggaagaaacactcttattcccaaactacagaataatgtgttaaacatgctaaatagttctatcaggaaaacaaatcactgtatttatctccgcaggctatttgttcagagaggccttttgtttaaatataaatgtttaaatataaatgtttgtctggattggctataacatgtctttcagcattaggcttttaagaaacacagggttttgtattctttactaaagatatcagagctcttaatgttgcttagatgagggtgactgtcaagtacaagcaagactgggaccttagaaatcattgtagaaacacagttttgaaagaaaaataccatgtctctaagccaactttaattgcttaaaagacatttttatttagttgaaaaatctagttttttttgtaaactgtatcaaatctgtatatgttgtaataaaacttatgctagtttattggaagtgttcaagaaataaaaatcaacttgtgtactgataaaatactctagcctgggccagagaagataatgttctttaatgttgtccaggaaaccctggcttgcttgccgagcctaatgaaagggaaagtcagctttcagagccagtgaaggagccacgtgaatggccctagaactgtgcctagttcctgtggccaggaggttggtgactgaaacattcacacagggctctttgatggacccacgaacgctcttagctttctcagggggtcagcagagttattgaatcttaattttttttaatgtacaagttttgtataaataataaagaactccttattttgtattacatctaatgcttcaagtgttgctcttggaaagctgatgatgtctcttgtagaagatggactctgaaaaacattccaggaaaccatggcagcatggagagcctcttagtgattgtgtctgcattgttattgtggaagatttaccttttctgttgtacgtaaagcttaaattgcttttgttgtgactttttagccagtgactttttctgagcttttcatggaagtggcagtgaaaaatatgttgagtgttcattttagtgactgtaattaatatcttgctggattaatgttttgtacaattactaaattgtatacattttgttatagaatacttttttctagtttcagtaaataatgaaaaggaagttaatacca

SEQ ID NO: 144 - DNA, 23451 bp, Homo sapiens
tggggagctgctccggcttcggcgcggaggggcggcggccggggaggcggcggcggcggcaggtgagaggccggggtcgggcggccgggcggcgcgaggtcctagacccaggacgacgctgagccaggcgtccagcttctgtggctcagtttacccagctctgagagtcttgccccgagggatcggcgacctcaatctgacagtcgtgattttgagcttgacaagcaaggggattccccgctctgagcctcagtttttctaagaaatggggatcacgatagtacttagctcatagtacacctgaatcttagcgtaaggtaatctacgtaaagccttaagcggaggataattttgcgttatgtataaaagtgtaaattgcacacacctatagaccctgcaagctcctttctaggactctgtcctgcagaaatactcatttaagtgtgcaaaacgaggcgtactgggtgttttctgcagccttgtttataattgtgacacattggaaacagcctaaatgtccagcaaagagttctttctgctccatgatttcatgtaatttctacctttaatagtagtagttgtaaaagctgaaacgaagaacagagccagtaataagtagctctcagtaattgaatgattagtaggtgccagacaccgccaagtgtttcccttgcgttaatttaaccttcctaacatccaccgaggtaggtacggttattttctctccatataacgtgtggggaaaccgaggttcttagccatttaagtgagttaactaagatgacatcactggggagtggaagagctggcatttgaacccagatctgttggatgtgtccagttgactcctgcattgcctttctggtacgtagcaagtgctggacggtaactaccttttttgttattatgatgggcttgaactaggtgttctaagatctcttcctgctggttctgacatctagagatctttgctcttctcattggctttcccttttaggattcccaggagccatgttgtcagaagtcctactggtgtctgctccggggaaagtcatccttcatggagaacatgccgtggtacatggcaaggtacaaagccgttagagcctttaaggattgggtaccccttctccctgatgctaattttgtaagaaggtaaaaggacaccctgaggcacagcttgggagcagatcagagagatcaggttctccccagccaggcaaggaaaagatttcttatgcccactgaagggattcttgggcctcgctcggtatgatagcaaaaagatgattataatataaagccctgtgagtggaatgagatcacctaggagtgagctttgatgcagaaggaaagaggtttgagaactgagctccggggcactaagacatttagaagttggaaggatgatctagcaaaggagttgaaaacatccattatctcattttacccttacagctacccccaaggcatacccttttattatcctattttacaaatgtgcaaactgaggcttaggagagaagtggtaacttgatccaagtcctatataccttggtagagcttggtgtgaacctaagtctgtctgaaaccacctctgctgcactctgcttttttttttttttcctgagacagtcttgctctgtcaccggagtgcaatcttgcgatcatggctcactgcagcctccaacctcagcctcccaagtagctgggaccacaggtgtgtaccaccatgccccactaatttttttcttttatttttctgtagagacgtggtctgacactacgctggtctcaaactcctgggctcaagtgatcctcttgccttggcctcccaaagtgctgggattacagatatgagccaccacacctggcttctcactgctattctttatgttcttatatttctcattgaaaacatggtgattatggggaagtgattccttggtattgagaacctctgaaattttgcaggcagaaggcaaagtggattttaacttttagctgatcgatggtggctgttcccaggcttagtgggagagcatgccaaggttgattagcagtgtctggcaagggcatggctaggagtggcctctgtgcttatgtttgctctcttcttagcacgtgggtcctggcccctttgccactcaccctcaggcttattgcttttgtcatttattctataggtagcactggctgtatccttgaacttgagaacattcctccggcttcaaccccacagcaatgggaaagtggacctcagcttacccaacattggtatcaagcgggcctgggatgtggccaggcttcagtcactggacacaagctttctgggtgagtgcaaggaggagaaaccaggtgtgctaagagcctacagagagggcagctggccaggtattctgggctgtccccaagggagccaggggccagctatttcccgggtgttttctaccctgacctcataaaattagcttcactcattttatttttttaaaatttataggtgtaaaacaatgcattggatctctgtgggctgttgtggacagatcatcaaggcctattgttgagtgaaaaaaatgcaaaacagcaaacatacgtatttaagtataaatatgtgtataaatgatagaaaaggtctcgggggcatagacatcagattggcagtggtgattagttctcctgggagagacctagggccagagagtagacaaagtgacacatgttttaaataaggagaatatattggcattttgtataattaaaaattgataaaagtaggccaggcacagtggctcatgcctgtaattccagcactttgggaggccaaggcgggcggatcatctgaggtcaggagttcgagaccagcctggccaacatgtcgaaaccatgtctctactaaaaatacaaaaattagctgggtgtggtggcacacacctgtaatctcagctactcaggaggctgaggtaggagaatcgcttgaacctgggaggcagaggttgcagtgagccaagattgcgccattgcactccagcctgggggacagggcaagactccatctcaaaaaaaaaaaaaaaaatttaataaaagtacaagttacctatgcttattattggaaaatatagtcaatactgggacattgtaattttaaaaatcacctattatttcccttctcctttccctgaccccagtaatgactctaagcatttaggcattaatccttctgggtgattttctgtagattgatagaaagattgatagagacagggagatatcttggttttttaaccaaaattgggtcaggccatataaaccattcagaagtactgattttttctttgtgtgtcacgtgtgtgtgctgatttttgacagcactgtgaagatttcatccactcataagcaggccagctttttccatcagtggagtcccctgtacctgccccagagctgacgtgtgttttctctgttgtcagtttactgtctgctccctgggctgaatgaagccttgctctttggaacagtgtttctcagccaggatggggtaaatgagaatctttttgggttttttccttacactgcacctgaacccttgacacctgcttcccattccccatgagaaaccacagtcactcccatatgccgtatggggatggaggaagagttgaaaattctcatttcacttgttgagatggggtctcactgtgttgcccaggctggtctggaactcctgggctcaagcagttttccactttcccaccttgggctcccaaagtgctggggttacaggtgagagccactgtgcccagccaaaatcctcattttagagcagccctttttaacttcatcatatcttggaatcacccaggagttttttgtgatggtggtggtggttttttttaaccaatacagatggatgggctcctggctccgcccctctcttattgggagttggtagtggtggtaggagtttttgaaaggggttccttgggtgattctggggacacctcagttaaaagccactcctttggagcgtgcatctgaaaacaaccagccagagcacatggaacttgctttccaaggtgcacagggccacccagccagaccagaaatgtctcctgagaaccagctgcaacttgtgtatgtcagtagcttggggtggaagcagccaggtatgggggaacatgtctcagaccactccaactccctcagtgaacctggggcaggtcacttcatcctctgggcctcggagcagagacatgtttcctgactgagggctgccatgaggatccgacgacactggaggcaggcattaggggtgcgacacagagtgcattatgtagggaagggcttgttagttttggagctctgggagacatactatcttctaggttgcaaagatctaccatctttctttcagtgtccttttgctccctcctgatagtaataaacattgaactttttttttttttttaagaggcagggtcttactatgttgcccaggctggtcccaaattcctgggctcaagtgttcttctgccttagcctcccgagtagctgggaatataagcacataccactgcaccgtgctactacagtgaacacttattgggcacttacgtgtgccaggcactaagtgtgttcacatatgttagcactcttagaattcgccagcattccctggaagtaggtggtggtattcatccccattgtacagatctgaaaattaaagttcagaggtcaagtggctcaggttacacttgttggtgacactgaaaggattcagacccaggtttctcctagccccaaagtccaggctcttaacagctgttccatctcgattacaaagctctgaaatacctgggttctcaatgatgccatgacttggccatttgagtatatcattaatccattcaacacacatttacccagtacttaaccagtgcccgaagtttcctaacacacgcatgcccaattccatttcccagtcccttgagaatgtgacctgaggctcagcgagtgatttgtaaaggtgagctggccagaaaggctctgccttctcagtgtctcagaggaaagtggcccaggttcctgtacatccctgggaacaacctgcctcaccttccccttctgcccaggcaccgcctcgcatttacactgtcctattcctgatgattatcttttggaggagggaaatattttgggggttaacttaacactcttttgattttggttttatacaatggaaggtgaaacctaggcccttgtgcgattgagccagcattctctgtgtgtgtctgtgtgtctgtgtgtgtttgttttaagactacaattttttttttttttttttttgagacagggtctcactctgttatgcagcctggagtacagtggtgcgaccacagctcactgtttcttcaacctcctgggctcaagcgatcctcctgcctcagccttctgagtagctgggaccacaggtgtgcgccaccatgcctggctagtttttgtactttctgtagagttggggtttcgccatgttacctaggctggtctcaaactcctaggcacaagtgatctgcccaccttggcctcccaaagtactggggttacaggcataagcgcctgcacccaaccttaaaactactgttaattagcacttactacatgccaggtgctgtgctaaaaagtttacaccccttatttaactttacgttcctgacaaccgtaagaagaggcactgttgttatccctgttttaccaaggtgggaaacaggttcagggaggttaagtcacacggccagtaaatggcacagttgggactcaaacccaagtctgcctaaagccaatgaacagacttgggtgtggggttcagaccataaattcgtgtccatccatgttccaattccagtgactagtcgattttctgtgttctgttgtttataaagcaccaaagtccctctcacccacttgtgtttgcttgtttgcctgtggaacagagcaaggtgatgtcacaacacccacctcagagcaagtggagaagctaaaggaggttgcaggcttgcctgacgactgtgctgtcaccgagcgcctggctgtgctggcctttctttacttatacctgtccatctgccggaagcagaggtgtgtgcgtggtctggggaaggagtccagattcagcctcccatggagaaaaaggaagagtttctgtcattgctgctggagaatgcacatgctctcttctagagcagcagccattggctgtcctcatcatgtgccaggcaccctgccaggcacggtatatatggcgtgccttttttttgagacagggtctctgttgctcaggctggaacgcagtggtatgatctcagctgactccagcctcgacctcccaggctcaagtgatccttccacctcagccttccaagtagctgggactacaggtgcgcaccaccatgcctggctaaatttttaaatttttgtagagatggagtctcactgtgttgcccaggctggtctcaaactcctgggctcatgtgatccaactgccttggcctctgaaagtgctgggattagaggcatgagcgactgcacccggccccagcctctctgttgttgtttttgttgtttttgtttttgtccagaacccaaagggaaaaaaacctcaagggggcagcccttcccttgagcagcagatgctggctcagtggccaggctctatgctgaggacacattcggaaacggcctgatacttgccgtccgaagcagaatttcaacttgagagaggcatgtccccttaagtgggtgaggggcattccagaatcttccaggctgggtggggtgggtacgtggaatttgaagacgcacattattacaatttttctatttgggaaatgggaaaagcacttcgtggaaattaccaaacatgaagtttgacagttcttgcttgggggaaatacatgtaagatgtagcgattcggacctttctggtgatcaaaagcagacccgtgttacacatggttggggagcaccgtctggcgggagaggccccggtgaacacacaatcctagtgtgcggtggtgaggcagcggtggagggagggagggcaggcgggggtcctagaaggggagccaggagggtctttgtgggcagctacggaaagtgtcacagtggaagcgacatttgataaggccttgagagatgggtagggatttctctgtgggataaggaggtgcacggctattgcaggcagaggggccagcctgtgctcagagcaggcccacagaaaagcctagcatgtgggcacaggaaggaggtgggagaaaggggttgacagcttgccaggtgcttctgggaagggctctggttgaatgacccagggatttaaatgaacttgatacctgttttctagttgtctgattcagcatgagttcctgatgttcaatagggatacatttggggtcaggaattctcccccagttgagaaaactggaccagatgcttggagtcaggcctgggcctggcccctggttcagtgctggcaccccactgccctgcgggagagtcacgtttcacaccctggtgtgtttcagggccctgccgagcctggatatcgtagtgtggtcggagctgccccccggggcgggcttgggctccagcgccgcctactcggtgtgtctggcagcagccctcctgactgtgtgcgaggagatcccaaacccgctgaaggacggggattgcgtcaacaggtaaccatggtccttacctggccagtgtccctcccgcacggcaggacagggacgtggcttctctcactgagacctcaccacctccctgtgaggtgagaggtgtcatagtggccattttaacatgaggaagctgagccccgagaggtcaaatggctggcccagggccacacagctagtgctggcagagtgggatttgaactcagagtctgagcttttctctcctgctctccaccacctctgctcacccccatcttggctctgttggtttcaagcgcccatggtatggtagaaagagctggagtccagatctagagggcagcaggttagatgaaccctcccacctctgcattgactcaggctaggacagtgttctcctctgtatggtaatgacagtgccctaggggtgattgtccagttttaccacatggttatgaaagaaactaagagtttgctgagaaatccacattagggggtgtgcccattagactagggcatctctcctcctacggggccgtctccacggagggcgtgtcacctctctgcgttcctattgaccacgtgagtcagtgaggcctgtccagacaggcttgaccacagaccatttctatcattaggagaatgttccttgagaaaccacccagtgcgcagaggttacgcagtttgtcccaggaccaggagttgtggatgaggcccccaaatgcagagctctgtcctcttcctgggcttgtttttgttttgttttgttttgttttctgagcttggtttttttgtttgtttgtttgtttgtttgtttgtttgttttttgagatggagtctcgctctgtcacccaggctggagtgcagtggtgtgatcttggctcactgcaacctctgcctccaggttcaagtgattttccacgggccaaaggactggccctgtctttcaaaaggtggagggtgactgtgtgtgtgcacttgcatgtgtgtgtgttcttatgctgcttctaaccatttctcccaccttcccctgaaggccagtcattccttctcagaacccttagggagagtagacctcccaccccaccccaccccaccacaccccacccatcatgtgtttctgagtcggaaaggactggagcccagtctcctttgaagactcaaatctgagccccctaaaaaacaaactgtgtagagcaggaggaagactcacatttgttgagagggccaggccctgggctaggtcagctgcctgagttaccttcccccgcctccatcactcacttcatcccaggcacgctgccacctgttggtccctgggaagggccagccagctctggtgtggttccagtgctgcacaagtggtgtgtctggaatgcaccccacacacacaccttgcccagctggctccccttgtccttcaggcaccaccaccccgccccagcccccagcaattcagcccatcgtactcttacagaaacacctggtttgtttttgtttttgtttttttaactatattatcatttattaaatgtaattaggtagctctggatccttggtctgttttttttttcttttattattattatactttaagttttagggtacatgtgcacaatgtgcaggttagttacatatgtatacatgtgccatgctggtgtgctgcacccattagctcatcatttagcattaggtatatctcctaatgctatccctcccctctccccccatcccaccacagtccccagagtgtgatgttccccttcctgtgtccatgtgttctcattgttcaattcccacctatgagtgagaatatgcggtgtttggttttttgttcttgcgatagtttactgagaatgatgatttccaatttcatccatgtccctacaaaggacatgaactcatcattttttatggctgcatagtgttccatggtgtatatgtgccacattttcttaatccagtctatcattgttggacatttgggtgggttccaagtctttgctattgtgaatagtgctgcaataaacacacgtgtgcatgtgtctttatagcagcatgatttatagtcctttgggtatatacccagtaatgggatggctgggtcaaatggtatttctagttctacatccctgaggaatcgccacactgacttccacaatggttgaactagtttacagtcccaccaacagtgtaaaagtgttcctatttctccacatcctctccagcacctgttgagaaacacctgctttgaagtcacatattgcagtgtcatggatttgtttgtatttgaatactgatcgctttctgaccttcactttctccattagactctaagctccaagaagtcagggaccttgtctgttttgctccctactaggagcttagtcacaggcacatagcagttgctcaataaatgctgaatgaataagtgagtgtatcttgttggcaccattaagttagtagctaagagcttgggctccaagtcagcagatgtggtcctgacccagcagtgagtagcactgtgatctccaggatgctgtttgacccatccaagcctcagtttccgtttctgtaagaaacaggataattattataccttccctgtagggcacaattgggaggattatgaaccatttctcaatggtccatttgagaaagcatttagcacaatgtttggcacatgctaatcaatagtatgttaactgatgttaactcattattaatcatagtctcacagctaccatgtgagttgccaagtccgtaaaaatccttatttggcagatgaagaaagagactcagagcaggtaattgacttgctcagggctcacagcaagtaagtgattgaaccaggcccccaggcgctgtgaccccagacggcctattttgaggggagcacatcctatctcctgggcattacacaaagcacttgtgtattttttccatctcaatatcctcagtgagatagacactattatccctgttttatggatgagaaaacagggtttaaggtgaagcagttgctcacagatgcccagtgagtcagtgataggatgggctccaaaaagggctcactggctgggcacggtggctcacgcctgtaatcccagcactttgggaggctgaggtaggcagatcgcttcaggtcaggagttcgagatcagcctggccaacacagcaaaaacccatctctactaaaaatacaaacattagccaggcgtggtggcaggcgcctgtaatcccagctactcgggaggctgaggtaggagaatcgcttgaacccaggaggcagaggttgcagtgagctgagatcgtgccacagcactccagcctgggggacaagagcgaaactccatctcaaaaaaacaaaactaggctgactgcttactccataactctgccactgagccacatcattctcagaggtcagaaaaccacctttagcttctgctgtttcatgaggaagggaatctgcagaaaggaaacaaaagctgagagaaaagagtggggaagtggggttgatcattttgtcttgttccatactcatgtgttttgggtctgttcatttaaactgtttgtgagcccacacctggtccatggaaggcagtgaggccacgtgcttgggagagatccagacatggttgggacgagcctggcccctccaggggtctctggggctcctgggatttgaattcataatgatcgtgctttggatctacttgcagggccctgggaaagagtcacacctctgcccgttcttcttaaaggcaggcttggttcaggtgtggacgcttatgcagaggtctgttatagtggcagttgccacctgctgcttgtggacaccttgccatcattagacacacatgcagctagcctctgaggagggtgggggttccaattctccagggaaggataatgaggctcagagaggttagataacaggcccagagtcactcagctagtaagaggcaatgcaggggccaggtgcggtggctcatgcctgtaatcccagcactttgggaggccaaagcgggcgttcgagaccagcctgtccaatatggtgaaaccccgtctctactaaaaaatacaaaaattagctgggcgtgctggtgtgcacctgttgtcccagctgctcgggaggctgaggcaggagaattgcttgaacccgggagaaagtgagctgagattgcaccactgcactccagcctgggtgacagagtgagactccgtctcaaaaaaaaagaaaaaaaaagaggcaaagtaggaccacgggagtccaaagcccaggctgttttgactgcgccaggtgggcttcagagggaagggcgcacacttggcacgctccgtagctggagaggttcagagtggacttgttctttctgagctcaagggcccaagctcctatgccccttggcctgcccagcacagccccaggtgacccctccccagccccactcctcactgccacagtaaagatgaacatctgtgtcttcaggtggaccaaggaggatttggagctaattaacaagtgggccttccaaggggagagaatgattcacgggaacccctccggagtggacaatgctgtcagcacctggggtaggtgtggcctcaggtttattttattgttgttattttaaaaattcttattacaatggtaggtgcccaagagtctgtgctggtttgggaggaatcgaatcaatggattctggaaaaaatagcattttcctattttggggggaatggggagaaatcttggggccctgtctcacaccccctgaatcagaatctccgggggtggaactggggcctgggaagctgcagcttccacgagctccccaagagagttgtaggttcaggatgcagagccgttgccgtggagtttgcacaccatccaggtggcctcccctctggcaagaactcttgcttacagggcccagatgctgtgtcctgggccccaccttcaccatgtggcttgtcgggggaagctggacagtctggagggagggggacccaggaatccaaggcctggcaagagcttcctggtggggcttcggggaccttttgccctcctgcaccttttgtaactgaagctgggctgactcattacttagcctctttcctgaatggggcaaaatgaacccaacccaaagttcaacctctctcccaagtagcacagatatgttagcttttcccacagctctgacccactggtttttctctttaggaggagccctccgataccatcaagggaagatttcatccttaaagaggtaacctgggggtggagcagcacattcagccatggctgcattgatgtgtgcagggggcagagctctgcacctttgggaagtaccataggaggcaggtgtccctggctcttcatcccccaatgtggccctcacagtgcactagctgcaaggaagcaggggtggtggggaagacctgctctctccttctccccttcagctcttaaattgcagagatatcagaaagggaaagtcatgcatggctgtgcccgtagactctcagctgctcattcattcattcctgtatttgcttagtaaacaagaatccattacttcctgtgttcccgatgatgctgcactggggcgtaggaatggagagatgaagcttgggtacagtttccaaggactctcagtctgcttgtgggggtggggccagacacacacaaaagccgccacaggacaatgtgagagtcaccatgatggaggcacacagggcagaggcaggatggaagcgggagggaggcttgggaggggcttggagcagaagtgacatttggagactctcagcctgttttatgtttctgtgtccctcccgctggaatcattggaatcacaaacgtgcatgtgcgatttcagcattctctgttctgtttgcgatttcagcatcctctgttctgtttgcacccacggcagaattgttgggtgcctggaatgaaacgcatggcagaggggagccaggtgcctttttgactgttccctaagcccttgatcaagttgtggggtggtgtttgtcccagggcactttgccacctccatgggccttttcgcatcagtaagggtcctggggctctctcctctttactcagggcggtcttcatggatgagtggcaggtcctggcctgcagcccccaccagctgggccactccattagtggctcagtaacctggcctgccacagcgccacacctgggcccccggctagttctctgggatctttctgtcccagctcagtcatgcctccctttccaaggctgtacgtcagagttgtcagcattggcactattgagatttggggctgggttattctttgtggtggggctgccctgtgcattgtagccatccccagcccctacccactagatgccagtagcaccctcagcgtggcaatcaaaaacatctccagacattgcttagtgtcccttgggaggcagaatcacccttgccgccgacctttgcactccgcagaagccagtaggagcgtggaacagcttcctcgggttgctccagcagtcgtcaggagagcctcgggtgccgaggtgaagctggtctgccaccgccccggatccatgtggaaccagagctggatcatgtgggggagtctcaaatgcccgggccccggcctgtcttcaggagcccacggtctgatggggaaggcggtcactggaatcgtcagagagaagacacctgaagggttgtgaagctgctgtgggtgacagtgacaggcgtcttagatctggctgcgagcctggggaatcattcatggaagtggtggcatttcattccttcagtgtctcctgagagccacttgtggcctaagcactggactaggccctggagctagaaaactgatgaagacgtgggctgggcaccgagtgtacggtctactgggggcatcaggagatgaatgaggaggtttccaaggggggcgggcaggggaacggccaggggaatggccaggcgttgctggtgtgctgggcggaggcgctgggtccacaggcctaggtttgagtccagctctcccacttgccagctggtgccctcaggtgagtcacttctcccagacctccagctccttgtttacttagggggatcttgaacatacaatcagaagcggtggctctgaagtgcttacctgtttgctggccgagttcattcatcctttccacaagtatcattaagcacctactgcgtgctgagtactggggcctccgcagggaacaaaacaaagccccgcctccgtggaactcatactttgttgggagaggagaaaaaatcagttgtctgtgagagcatatcaggcagtcttaagcacctttaggaaacaaggcagggtcagaggctacaaagagaaggaggggtccgattggatgggggttcgggggctgctggtgaaggaacattgagcagaaacctgaataagtcacgccgctatggggcggggctggtccctggcagaggaagcgcggtgcaaaggtcctgagacgagcacgctgcctgccgtgtgacacagtagctgggaggtcagagtggctgagtggagtgagcagcctggggagcgaggagagaagaagaggctggggcagtggccaagcccggatcacaggagcgcttaccaggcttaccccctgcgtggtggccgctggatgggtatgagccctggatctggtggggctggtgacaggcctgtctgcagaggacttgtctaagaaagatgaagatgcaacacccaaactcctcccgcctggctagatgggagcatggagcaaaccaacctttgctgcctgctgtggggtgccacgggagcagatggcggcttcacagagaagctgggggccagactccacgttaatcccatggatggcttaaggagcttccccccaccaaccatgcgtggtgcctctctgtaaagaaaaaatgcattgtttgtgaagtggatcaagatgcggcctcccagaacgctgcccttttgaggaatggcttgtcttagaagggaagagaaaagccaaatagaatgttcatcttttgtaaagttaaaaaaaaaaaaaagccagcctccaaggctgagaatcgatattaatttcatgggcttatgggcagtgagataaagcaggtttctggcagccctttccagccctattggattttacaatcttgaactgtgaagacagcgaataaaggtatcaagggctctgcccgtctccagctgtctcgggccagagctcatccaaatcccccaccttccatcccagcctgcagccctctgaaaggcaggttggatggcaagaaatgtcagcttgagccctcgaagacggctcactacaaggacagttgggattgtggctttaggagggatttatgcagctcctctggggcaggtgaggaccacggggtcatgctagagagtcagctcaacgtggctgcctgggacacgtctatgtgccagagggcagccaaggggatgactgactctacatctggttttagaccagggctgctcgtccgggcaccattgaggtagggcaagaatgggctcagcgtgctggggaccatcctcctctgcaaccctgccctccctgcatttacgagcccgtgcgtggcactgcccgcaccagctagcctgggcatcttccctctgtgtgatccatttcagggcctgttgcttggtctttctaaaactccagcttcgtgggggtgacccacacaagtgaaccttcgccccctccttgtactctgctatagccactttgaatttctcactggatgactgtgccgggttccgccacctccaggctcacacaggctgctccaactgccagaaatcctcacccttctagctttgcttggtggcttcttacccttcctcagttctcagtgtccacgtcatgccagaaaaaccttctcggcccttctcccctatcccctctctggccccggccccaaggccacgctgtgcctagcatgttgtaggtcccagttgaagttgaatgaataaatgagtgaaaagccaagggagaatggccacccaaccagtgcctgggatggaggcgcagctgtggccagcagcagaagccccatgctcccccaatccagtgtcacctcttgtgcctcccttcttcctccgtatcagggtgggcggcttcccggactgctcccagtcctgtcccagctcctccatcttgagttcagtgtggacctgcctcctcttcaccctgcaggtcgccagctctccagatcctgctgaccaacaccaaagtccctcgcaataccagggcccttgtggctggcgtcagaaacaggctgctcaaggtgactcttgttcccttcttgggcaggtttcaggaaggccaggacacaattacatctggattttcgaggtctccctctggctgatgggttatagggggtgtggtgggtggtgggggcccttagggaggtggttttggcagaaaagaaggtaccgtccgtgcccgtagcctggccaggaaaatgacagtggtcgggctcgttagacacactgactttgcagctgggaaggcaaaaaaacaggctcagaagagaggtggtttccccagaggatgggcacgggctgtgtgaacacctcctccctccaccccactgctggggcagctgtcctgcatctgcctgcccccaggcctcaccagccgttccttctttttttctccagttcccagagatcgtggcccccctcctgacctcaatagatgccatctccctggagtgtgagcgcgtgctgggagagatgggggaagccccagccccggagcagtacctcgtgctggaagtaagagcctgtctgcaggaaccggggttactgagtccacaccactgtccaaggcagtggctctgcaatctggctgtgctcagaatcccccggaagctagcacatagaggtcaggacctgcctctggcctatgctctcagctgggcccaggtctgtgcgtgccatataagcgtatcttattttcaggcctcttcctgggtgattccgagtaattgggagagtgcaagggaggccagggcctggctcgtgctaagtgcaatggaaacaggtttgggtcacttctaaggagctctggcccacgtaggtagatggggatgtggctgatgcagagtgctctgtcggtgcaggggtgacttcttggtcactctcctgctattgctaacttcatgggtgcattcaacaactacttgtcaactgcctgctttgggtcagacagatcctaacattgttttttcatcattgcaaccccatccactgccatttgcataattctagtgtagaggttgtgacctggtactttgggtgtgatcaggcctgtgtgtgaatcccagctccacttctgctggacgtgtggcctcgctagagtgtcttaagaatgctcagattagacgggcgcagtggctcacctgtagtattagcactttgggaggccaaggcaggtggattgcttgagtccaggagttcgagaccaggctgggcaatgtggtgaaactctgtctctacaaaaaatacaaaagttagccagacatgacggtacatatcggtagtcccagctactcgagaggctgaggcaggaggatcacttgagcccaggaggtcaagtttgtagcctgggcgacagaatgagaccttgtctcacacacacacaaaaaatgcttggagtctcatgggtgacacgcaagcacaatgtctggtgtgctatgagcttagggaaccaaagagcccaggctccccctggacacagtccacctggcctggtgaatatgggctgttagccatctggctgcccttgcagaatgagaggatcgggtggcccctagctgccgtggctgtgcagcagccgtcagtgaagggacaggagaggggcgtgcggtctccatgtcaccacagtccctccccgcgccccgcactctgtagtcattgcctggtgtctcccggtcccccgtgggcattcgagtctgtagcccctgtgctgagtggaagctgccactaaagcaagccttttacaaatgattcttttcacttgatcctcacacccacctccctgtgaagtaggtgtcttatccctattttacagatgtaaaaactgaggcctgaagagagacttcccccaaggttatccagctagtgagtggccgagccaggggtccagccgacggactggtctgtccctttattcaacagatctgtcatgagcacctactatgtgccagggcagcgcctccatcgaattcctgtgtttcggccctcattccctcagtctttgtcttcctagctctcaattccttccacatagaaaggagggaacacagtccccccgagtaggaaatcaataatgatagaatactgcctaaaatacaccctgtcgagtccctggagaatgccacagaacagcacgttgattatacattgtgtgtatttttggctgtggcagccgctgaaatgtgcagctcagctcctggacagctttgcactcaaaccagcgaactgttctcctgtgtcacaacctgtcatctgatccttgacagattttggatcagaatgtgacaggtgtctggaacctgcctcggcaacgtgacacctggtgctcaggcgcagagagcggcccccagaagtcttctctcacatccagcccatcaggctggtgagaggcacccggggctgccaccaggccatcatgcctgtctgctcatttgtcaaaaatggtgagcttggcgcagagcgaggtatgaggcaggctgttggggagggccactccaaccctgcctgaccggccatccccatgcgggagagctaggtgggcctccgcagagatgcctcagtgattggcaactcctggtatacaggcaatccaggtgccccggaacagagcttcacacggaagtgaggaatgccagggggtgctctcagaggcagggtagacaggagcttcatgtcaggcagacccgccttccagtgccagcttggtacctactagctcagtgatcgtgggcaagtcacttcttctctgagcctctgtttccccttttgtaaagtggggatgatgctaacgtacccataaaaatactaacagcacatatctcgtgccaggcattgaacagaaaactcaccttgtttcgtctcagggcaaagaagcagattttttttttttttttttttttgagacagagtcatcttgctctgtcgcccaggctggagtgcagtggcacaatcttggctcattgcatcctcccaggttcaaatgatcctcgtgccgcagcctcctgagtagctgggattacaggcacacgccaacatacgtggctgatttttgtatatttagtagagatggggtttcgccatgttggccaggctggtctcaaactcctgacctcaagtgatccacccgcctcgacctcccaaagtgctgggattaaagacgtgagccaccacaccctgctgaggcagatactcttatgaccccggtttacaagcaggagacagacccagtgcagaagaccttgctcaaggacacacgaccaaaaaggggcagagcagagactcgaacacaggcctacttgactccaaatcccatggtttttacttcctgatggctgggaccgtggctgggcacccatccttagagccccagcacgttgtgggtgtttggtaaatgaaatctaactactgggtgcctgggcagtggaagctgtgaagttttattttttcatccacatgcatcttgttggatccttaaagagcaggaagtttatcctgcataactgaagaaacctagacaaacagctgtttccctgcttatggccttgctggagttacacctagttcttattctgaaaccagtccccaaggcagctgtagggaggcatgttatttgaaactttttctcttgcaaatggcagaaatccatttcaaccagacttttgtagaaagggaatgtattggctctcaactgagaagaccagaggtaaatggcttcaggtatagctcaatccaggggctgaaacaatgtgtcgggaatctgtccatctgccacgtaatatctgatcatgtggcaagataggtcatcttggcgacttgtgtctgaagttaattattttagcagctctagtgggaaggggcagaggaaaccctgggagggctgtgattggcccagcttggaccacatgcccatccctgatcagtcaccagtgccagaggcttctgtgaccagccctaggatatgtgctcactgctgtggtgaaggtatgctcagctctacccaagctccgtgagaaatgctgcagggcagaaggattcttttacaagtggagagggccagggtgccaggtaggcaaagccgttggctgtctccagccaacaactgtcagatggacgaggcaggctcaggggtgggcataggaccttggcctcaggcaggccaagtgggaacagatggaaccttctcccctaggagctcattgacatgaaccagcaccatctgaatgccctcggcgtgggccacgcctctctggaccagctctgccaggtgaccagggcccgcggacttcacagcaagctgactggcgcaggcggtggtggctgtggcatcacactcctcaagccaggtatcccgggggtaggtgggccaggctgccagcctgggctcctaagaggggtccacctggagaattcccttgaaaggaaaaagagacctggaaacaggtctcagctccgctgtgtggccttgggcaagttagttaacctctggtctttgcttcctcattggtaaaataaggatgagagtatctagcttgcaagatcgttgcccagattcaagcaggaaagtgcacctagagagcctggtgcagggctgggctgtggctggggctcctgtcatcggggctgtccgcacaagcttgggaagtaaccagggcattgtcactctccacgtctgcctaaccttgccccacttgtacccttgatgtggtcaggatgcggttgattttgctacaaaacgaaagggtttccttcccgttggtttggggaaagaggaagaccgagtaatgggcttggcttaggaagctccctggtgcctgggggcctggcaaggggcttctgctagtgtttaaccacctgacacctacctctgccctcaggctcgctcctggcctacagtaggcactaaccggtcccacctgcctccatttccctctgtgctccttgtcccctccttccttccttctttctctttctgtctttatctcctcctctctgttcttcatccttcctttcccctctgctttgcactgagcccccttaggctccagacatcccctcacactccatgatggctcccaggcctcaggaggtggccacatcctcactccagccaaccccaactgttggttcctagttcagagcccatgacgatggtgggacttgacatttctggagtgtgcccgctgtgccaggtgttgtgccaggcactttacctgcgttatttcctttaagcctccctgagatctgcacggggagtcatcattagccccattcccagatgaggagactgagactgagagaggggaagtcacttgtctgaggccacacggccagtacaaggcaaggccaagtcctgtgacttgagagcccatgtttttaactcttgctccctaaacccctgggggtgcaaggctgggcattccagtgcacggaggggctgcaggtaaccttgggctttatggcctgttggctcaggtgggtcacagccaggaaggcacagcaggaaggcctgggcttttgccttgaatatgatgagcttctcccacggagcggagagttgtcaagggtgacctgccttccctccccgcagggctggagcagccagaagtggaggccacgaagcaggccctgaccagctgtggctttgactgcttggaaaccagcatcggtgcccccggcgtctccatccactcagccacctccctggacagccgagtccagcaagccctggatggcctctgagaggagcccacgacactgcagccccacccagatgcccctttctggattattctgggggctgcagttcgactctgtgctggccagcgagcgcccagctcctgacactgctggagaggccccagccgcttggcgatgccagccaagctctgcagtcccagcggtgggacctagggaggcatggtctgccctctgcatcctctggagccagccgagcaggaggcctaggagggtcctctgagactccagacctgaggcgagaagggctgcttccctgaagctcccacagtcccatctgcttcaggcccccgccttggcctgtgttcttcctggccgcctgggtccaatgctcaggtgctggggcctggttcccggagaagtgtgccttctctctcccttttcagggaccgccccctgtctctcagggccaggcctctccctcctccaggaagccttcccctaccccttgtcgcccctccctcccagagcacctgctgtctgggtggctcactcagcacttggtgtggccttcccttctacctagcgggatggggctcccccaggggctgtcccggaggcggtgggcctggttaaataaggcagggtttatatgcactttcttccgatctgtacctgagaggtttgtggaaaagatggcaaatggggaataaaaagattttgtgtcaac

SEQ ID NO: 145 - DNA, 26857 bp, Homo sapiens
agagcctcctagcccgtcggtgtctgcgcccatcgatccctttgtctatccccgaccatggcgaagctgattgcgctcaccctcttggggatgggactggcactcttcaggaaccaccagtcttcttaccagtaagttgggttgtggtgagggctgcagccttcgtcctcctcactccctgccagctccacgagcccccagaaagttgggtccaggctgttaacagaacatttacaagcaggtgctagatgcacactctgcgggggtttcataaatgtttgtccagccgtcatgtgtcacttgaaaacaaactcttgctcatggcctgagacatgggataaggaggcaattgccaggggtgtgagtgcccaggttgtcagcatacacgaattaatttttcatgaagatttgtgtgccctggctacagattcacttctcaacctggaaagaaacaaactaacctggctgggggttctcctgatattttgtgtattagagaaaggagcccctgtcgcttctgcgccttgactgcctggccatggcaaaccttccaggcttgaagattctcaaattgaggctactgagggccacagcaaaactgcgtgtggacccgagcaggtggagctaacgtgtgctgtgatggttcgcttcagtgggggcaggcggggaagagggaaccctggagccagcatctgatgtcctggggtttagctctgccccatgagtatgcgatttgggcaaatcactttacatctctaaccttagctgcttcagtaaactggaaatagtaatacacactgcctgcgacagagtagctattcaataaatgttagttccctgcttccctttaaagtatttaataaagggttaagtgctatacaaggggggtggggatattttaagaatgtatcaaaagtttcataacttttaacaggagttcaaagtctacagatcatcctagtctctaaggcttagtcaacaatgccttatttactttaaagtaaaacctaataaaaattaaatataaaaaaattatatgagcttatggactaattagaagcttacattcagaatgggtttttactatttattgtggatgtttttctaatttttttaagttacagagtgcagaaaaaaagtaagaagcagttggtattcttggcttttaaatcatgtaaaaattacagtttgtgagtttttattaatcacagtgctggtggctgccaaaggagattataggtatagataaaaatatatagataaaggatgggttgctgagcctcctggagtgacccagacagaggaaggaagggaaattttacccactgttggaaacccctaaaacctagctactcaactgggtctggggaccagatgcctgagcatcacctaggggctccctgtacaggcagaatctcaagccctaccccacactattgaatcagaaccagcgtcatggaacaaactccctgggggattagagatcatgaatctgccccagggagagaaggcaagagatgatatcatgaggcctgcatcaggagcaagccaaatccccaggatagatgcatccttttttcttcagacttggagtgtatgtgtgtgcggctcacaggaagctatatatgcctgggctggagggaacttaaggaagcacacaagggatgcctcaagagatttctgagtttcccaggtgggagcagtacagagaaaagaactgagagagttcccctagaccacgagtctcccacccacgagtctcccacctttgtagtcggctgtatgtgccgcacaagtccagggaatgccttggatgatggtagaaacagctcccctcccctaccccaacttgggctatggaatgttgcagcatctgtatggcaacttccttgtccctacattgctaattgcaatacgtgagtccactgagtttcccttctcagaaggaaaccacaaagctaacgttgggcctctcgatgcatttctgccattccatgcttactgtaggcaacacacagttgtgggaagagagtagttgtggattcctgatgacctgggttagatatcatttctgcaactttcaagttattttaccactttattccagaaaagttccagccagtttctccacccgaaaattaggggataataatacatattacagcatatatatatatatatacacacacacacacacacacatacatatatttatatttatataaaacatataaataaaactaagtatatatatatatataaaaatcaggcatatagcagatgtcctgtaaacgttagcttttatagctgtcatatgtgatctcaaaaatatagagtgatacttgaatatgtattataatcatacttcattgaaagtctgagataaggacaaataatcctccaaccctccagtctcccctatgaatgcaaccaacaccatcttctcagtctgatgtacttgcctagtatctccacaaaacacttcagtggacatctgcagagtaccttctctttgcaaacgttgtgtttctgctggaggttataggaatgaataggttgcagtattcactcaccaattttaaagtctactgggagcaaaagaacaaaaactgacagctgtgaaactgacaactatgacaactatggtaagaaagttgacagatgtatatgtgaaggttcctgagggtaaactaaggagttattaatcccaatgcagaagactggagaagctacaaagcatcatgagtaggggtctttccagtgggtaatgggctaaagagcattctaggtgaagggaaaagtgtgagcaaataaaaagaggtatgaaagaaatacagggaagagtccttagtatcatgacacttgatttcaaatcccaactctaccctcttaaataagcaaccacatgcaatttactcagcctctcagtgcctccatttccttacctacaaaacagggtaaatattcatctttttctcaaaggtggctaaaaagattaaatgaggaagtatgtgtgagagcccttattggagcttggcacatagtaggccatgaaaagcaatttgaatgaatgaggcgtgtgtagtagcagaaaatagactgattagagtgaatttggccccaagaagagtttgagaatcgatacggatttcttaatgcctaggcaaagatctctgcttttttctgcgagcagccagcatgtattttcaccgaatacttctgccttggtttggatgttcgtcctctccaaacctcgtatttgatctctaatgttggaggtggggcccaatgggaggtgtttgggtcatgaagatggatccctcatgaatagattaatgacctccttgggagtgagtgaattctcactctattcatttcgagagagctggttgattgaaaagagcctggtacctctcccctctcttacattctctctcatcccatgatctctgtgagtactggcttctcttcatcttctgcaatgagtggaagcagccagagcccctcaccagatgcagatacccaatcctgaactttctaaccatccagaatcataagccaaataaaccttttttctttatcagttgcttagcctcagatgttcctttagagtgacacaaagcagactcagacaagttcacagcaaaggctgtatggtttctgcgcagagttcagagtctagtgaatcagagatatatctcagacattgacccttatctcttaggcccagaacatttggacttaagcctttgacaagatatttcctaataaattgaaaatgaggtagaaaaaatatgagttggatgataataacacaggtgggtcaattttcaggtgcatcttccagcttttaagcagtgttctctgtagattttgcctggtcagagagctaaatgtgagctttgtgttcatacttgaattccaatccctgctcagccactttataactctgtggccttagaaagccacttaatcttggtcaactataacttagggaaaataacacctcacggaggtgtttgaggattaaacgcgggcatatacggtacctgaactatagtagtaatgattatcctgttgagatatgacatgtttgggccacaaattggaacccaaatcaacaagtgctgacttaatgcccccttgcccaccctgggctccctttaactgtgattattctatgttttccaggctagagatcatcttctatgagagagaagcctgaattagaataggagctgaccagttctgcctttctccatcttttgtgaacccatatgtttagtgacccttgtgagtcaggcagcatgagtattcttcccattggttttgagtctaagaaaagtgaatttgactatccttggtgtttttcacaagtcttggcccattcagtgattttatgtccttgaatctctccttccatgccagtctttgtgttgtcctcggttatgaccatcacccttaacatcttgtacctgccctttggttccttgagggcatgctacaaatattcactacactttccctagaccagagttttttcaaatggtgggtaacaaagtcaatttagtaaataattaccaacatttaaaaataaataaaacagaattgaacagaaaagttatgaatgtatgacacagattaggatgagtattgttttgtgaagcttgattcagatgtgtatgtgtatgtgtgtgcatgtgctgggtgttcgcaccatataaaatacttttcctactgtgagtctctgtctgaaaagtttgtaagccactgctttatcacttccccttttatttccttattgtcaatatttgcaattataatgtcagattttcattttgaaaatacctttccctttcttaggttatgggacagattccaactttcctttgaagcctgctttctaagttcacatctatcaatcaggaaaccacagtctcctcacagtccaagccttcatcatctattcattcatctctgtatttctagtacctagactggtggctctttactctggttatacgttgggacaaactgtggcacttttacaaagcagattattaagaggcactccttgcctcttacgtcagatttttttagacagcgaaaatgatagccagtggcctgatggtaggaatgtactcatttttttctgaatgaataaatgaaagatcaatcacccccaaattcctatcattttgtaccacgtcggtaagaattttatctagcgtgtctgttccgcctgtagcccatccgcctcctgtgagttcaagtcatcaggaggacaagtaaatttcttagcctatctgaagccaaataagatttctagggatatttggataattgtcactacttgctatgacaatactgtatcactagttctctaaaaaaaaaaaaaaaagtttattgtttaaatctcttggttgtgctaacgtcgtctgtttctttcaaatgcagcatcagtagcttcgctctgctcaggcagccggctggcacttccttctcacatctgttcatttttcctttgtcctttactcagacattttctatggtgtttatgcactcatatctaataagtcgctcctgtgtatgtgtgtgagtgcacctgtgtgtgtgaaatgcctttttacatgcaggccttgtgtatgattttctgaagttacaaatcctttcaacgtacctgtatttttcaagcactacatcacaaagcagatgcccagtccaggctgcggagtcagattgggcagatgagtaggaggctgcccatctgtcagcaactctaaaacatcaatggaataaactggaaccatgttgccatttacccggactttccacctaggagtccttacacactgatgaaattgctcctgttcctgccaaagtacacagagccctagagaggatattatgtatctcttatgtgtacctatccacctctgctaaataaaaactaaatattgtacccagagttccccacttgtcttgccctggccttgcctggaaaaattgcaggaaaaactctggagttgaaactcaggcaaagtacagtgaaggagaacttttgtggactgcctacctttgcaacttattataatttctgaatagttttgtgtgtgttttatttctttctcccccacagaacacgacttaatgctctccgagaggtacaacccgtagaacttcctaactgtaatttagttaaaggaatcggtatgtatgtgagaggaagaagggtctcatttgaacttccggtatttttttgctctttgtgtgattaatgtgcctgttcaattctgtccaaaaataaaattttgaatcaggagagtcagtggtagttaatgataaataccatgttgtttgacttttgacttcaccaacatactgccaaggtgttgggagttttggttgtttgtttttgtttgatcaatagagcaaaaaaaaaaaaaagaaaaaaagaaaaaagaaaaatagaataatgtttgattccatggcaatctaacctgaggagatggcagaagaggggagggagagccagataaagcattgaataaaggtaacttttttttagaaaggctctgacaggactttgcaattaccacaaggcttctccttatgcatctctcttttgatattggacaggaaaattttttccagaagctctcagcagatttccccttagatcttatttgtcagagctggaggacaggctggtgccctagttgcaaaggatgctgggaaagtaattatcaagcctccaatgtgggaggcaggccctgtcagcaaagataaaacggtaggagaatagcagctgggaggcaaccaacaaggagagtccccgggctcaactctccagctggttccaaccaaccagctttgttatttgaagacaattggtttgagatcatgcttttgtgtgctttgggtgtttctttttctttcttttttttttttttttttttgttcttttagaattattcatctcagttgattaaggctcaggaggctagatcagatgacttagtaccactaaatttcactagatatcttatggtgcgattgttttctagaaaaatatgatattgatatcaaatatcactgggtttttgaaaagcaaactttccactaagtgtagaaatacctatcaaatagttcatttttctctagataaattgaaatgttaaaaatttacatgtacttaaagtataactaacttgaagacagtaatatttaaccgatgtttataattagtagtaaaaattcatattcttgatcacctaaaatgtatccccattttaactcaactatttggaatttgcttatatcttcaatatggctttccaagggtttaattgatttggaagtattaagtatcaacatatatttgtaatttaccttgtatctttagaaaacaagttcttttcaaataatcatggcttttgtacgttttgtgaatttccatgaactttaagaggattcagtctttgaggaaaaagctctagtccatcaatttaaaacaaatatactaagtgtaaattttaattaaacttgttaatgaattaatatatttttaatttccatataatcgcattcatcaatttgaataaatgaaagaatgaattattctgaacctattaaagaagagtgatgtatagccccagtttcaagtgaggtgtgataaagaaatggatccacatcctgcaataatatgaaacaacctgtactttctgttctcttttctggcagaaactggctctgaagacttggagatactgcctaatggactggctttcattagctctgtgagtgttttctttcacttttctgtgttctagaacgttttctaggactggcagtttaagtctttcacttaggctttctgtatacccatgcccactttcaaataaaatgaacagtcatggtttaaaagacaaattgtgtatgcatttacacttgtgctataattatgatcatgcgtgttctatgcatatttgtgttcttcggtctacattgaaccatattacgttagcttctattgcagcaatttttttgtgagttcagtgtattcaagaattgttttcctctcaattgtctattccctaagcacttaaaattgccatattcaaatatttgctaaattaaatatacatttaatgtatactacttcacaggtcatttcaactttcacatttttaaacaaatttcagaataagccctttaatttaaaattgttgataggtcccaattcccaattcccaagctttgaagacagaatccaccatatttgctgaaactgtcctgcatatagatcgctatggtagctgatatagtgcaaaacaaaagaagtccaccatctggcctagggatcataacataacagagttgataggaaacgacagacaatcatccagccatttaaaaacctttgctaccccttgtaatttacttagtccagttttctcttacaaagatgatagactagtcatcctgcaaagcaatgtcttgcaaactttcttgagcaacataaggtgtatttcaagcaaaatcttatatgggaacacaatatataaaacaacagctttattgttttgattgaaggctaagaaaggagtagttcctctggcccaccaaaactctgtctttgagatgcttccaaggacctaccagggaacagtttaaaagccataagcaatattctctctgtattccttgcttatatcattgaagactattattaattgcctttttggtctgctcttccatttttgatctttctcatgggctggaagctgtagtgtcgtgcacatatgactttgctgcaggggatgaaagggtttgtgtggggtggcctagtggagcatgtggcttccagaagacttctcctggggacccattacagaagctaactaagaggcttcctatgtggccatctggctagccctgtggtttggagcagtcaacatgaacccatgggccatgcagcgcctctattagcatttgaagtactggtattgtgcttgatttttctcctccatggtttataagggattaaagtatcctggaataaagagcttcaaccccaacagtcctggaaaaatacttctgatggacctgaatgaagaagatccaacagtgttggaattggggatcactggaagtaaatttgatgtatcttcatttaaccctcatgggattagcacattcacagatgaaggtaacaatatttactatttattaaaaccaaaaccaaacttaaaacaaaaacagaaaaacatgccaataaatgaattattttttctcattcaaacaaagcatagtcatgaataatgttcttactctgggttttaaacttaccctctatgttaattgaactttatagtaaaaccacttaaatacttgagaatgctaaaatatttaagatttgtaaagcatctaattttgtaaaatactaacattcacattatccctataattaccataataataatatccagccctgatcattatagcttttccattttaaacgattttcaagactcgggcatttacaggaacagatttttctaacccaaggcatctgtaagctataggtccagtgacagaaagtcaccatggtcagctttctgccggtcccattatcttcaatgcctcctgtccgctggttcctctgttctgtgttcaaaatgctcctctgcatgttggtccctttcaacataacttggtgtcatcctttatgtctttactccctttctccctttccatttgctgtcacttccttgtctctgtattaattttcagccccagttgcacaatggtagcacctgaagagtttaaaaagactcgatgcccagcccccagcttgacagattccaattccgttagtctgagggaggcctggatcacagtagttgttaaaagtttttcagttgataaaaatgtcaggctagggttaagaaccacgtttatacccattacctccatttcatcatcagacgatccctcattcagttcctcttctggactttccccactgtgggtggctaaaattgctaccttgagaatcatcagtgatgttcctactaacaaatctcctctcttcccttcctccctctccttccttccctcttcccttccttccttccttcacctccttttgttttttgttttgttttgtttttgagatggagtcttgctctctcccaggctggagtgcagtggcgcaatcttggctcactgaaaacttcacctcccgggttcaagcaattctcctgcctcagcctcctgagtagcggggaccacaggtgcatgccgccatgcctggctgatttttcgtattttagtagagacgggggtttcaccatgttgcccaggctggtctcgaactcctgagctcaggcaatcctcccatctcggcctcccaaagtgctgggattacagttgtgagccaccgcgcccagcctacttcacctgcttttatgctgtttaccattttctcattcacaaaacttgctcttccctgatactgcagtgcacctagctgttccagttctcatcctactacaggttttctccccaattcattgttttgtcactcattgctacttccctgagcactaccccagaggtttgatcttttacttcctctatattttctctattttagaactttcaaaccagtgtcacactgcctgctttctaggaggacatccccaaataggggtattattattcttcttcttttcattagcccttcacttttaatgccgcaggtgcttactggacacttctatttggattcctttcctatagacactttaaactcaaaatgttgaaagtgattttccatccttttatctttccttctcttccccatgtgagacacacacacacacacacacacacacacacacacacacatatacatatatatccctttcaatggactttccactcatccacccattcatcaccattatgttttattttaaaaatatttttaagtacaaagaaatatagtgtttgatgtgtggatactttttaaaataaaaatgaggtaatattacacaaccccttctataaatttcttctgcattaaacactacatcatggactcctttatatatagcacatttgcagttgctttgccaaggcagttcgggattcagttgtgtgggagcactgtaatatagctcatctgctaacaaatatttaggttgttcccacctttatgctcattgcaaacaatgccaaaataaactttctcgcacatgtattttctgagactatatccttaggatacatttctagaagtagaatccactgcacaaaatgtgaattcaggttttaatcctcacttgaatttgatttccaacaccctccttcctcagctgtattcagggcctttggattcttcctgtcaaatgcctctcatgacctttcctgccttttattgccagtggcatcctcttggtccagtcctttctctccacattgctggattactgctgtagcctcagctcatgttactccttggttcaaataccccagtgagcaaagcttggatcttcatcttaagccctaacaagactgattctggctccctgtggtttcagccctctcactctcccactctctcttgccttcactctgctcccagcacaacctcacaattaagtgaatatgtccaggaagttctgccccggggcctttgcacactcccagcacaacctcactattaagtgaatatgtcccggaagttctgccccggggcctttgcacactcccagcacaacctcactattaagtgaatatgtccaggaagttctgccccagggcctttgcacactttctcccctcaacctggaatgctctttccctagatatccacattattcgttctcttatttcacttaggtttttgctctaacatcccctcatcagagagaacatgcctgactcccatgaagataatacttcgttactctctattcttttatcctgttgtatttttcctttgtagcatttaacgccaactaaaataaattaaacacttgtttgctgaatggggtaatgaaaatcattttagcagctttctctgttcaaatcttctcaattcaacctgccaaattttgcatcttaacatggtgaaaccccatctctactaaaaacacaaaaattagccaggcatggtggtgggcacctgtaatcccagctacttgggaggctgaggcaggagaatcgcttgaacctgggaggcggaggttgcagtgagccgagatggcgccattgcactccagcctgggcaacaggagtgaaactccgtctcaaaaacaaaacaaaacaaaacaaaaacgccaatttgatcatgtcagaggtttcaaaagacctactctttcttaaggcaaagaccataatctaacttttacttgccagctctgatcacacattcttgaccgcttagactggtcacctttgtgttcttaaagtcccacttatccaaggaagctgcttctgtttgtttgctactatttctcagatgttcttctatggaatgtatcatctcacactgtgtaaattacacctgatcacaccttctcatattgggagttcccatggtttttatccctttcatcgcaactgtgcatttcgtggagaccatttgaactggaaaacttaaaggattctttggagttttagtgtcagtgatactcattcttgagaatttttttttctcctgtggagttttgagttttcagagactgtcactggttcttccttgagccacttttgtttggaacaggagcaatcaccaatgcttctctctacaaagagatgaaaatattccatctgcctgacatcctaactactagctggaggtgggttgaaattggtttttggagagagggctgacagtgagagcttagttaatgtttcatttttgtttttaatctcctctcagataatgccatgtacctcctggtggtgaaccatccagatgccaagtccacagtggagttgtttaaatttcaagaagaagaaaaatcgcttttgcatctaaaaaccatcagacataaacttctgcctaagtactgagatatatcacatttctattttcctttagctgtagcggatagttaatccacttttagtttttccttttggccagagtaggtatggctgttcaactctcatttctaatgatcacaaactcctccacatgctcttctgaagaaccttctgaggactcaagcccctcagagacggcccattcttttcctctcttgtttctcgagctgattggatgctggctcctggcctcaggatctccattcaagttattaccaggaaaaaaatcctcttcttcagaaccagacttagtatttcaaacccaaaccggcttcatagataaatttgacatcatgagcttatttatttatattaaaaagtagactcttagatgtttccatgaattagaaacacagacccaagaggagaccctgaatcaagtgcatctaagacctccttatactgcctccgctgctgtttgattgcacaaaatttatgcaatagcagatctgtggtaacactcaattccccctaggcaccttgttcatgtaacatatggtgaaataaaacactcaagaatctccaatctcagtcaacttcctcacatgccctgtgaagatttggcttgtaaggccagtgatggatttaggagaacaatccgactctatcttctgaaacatttacctccaactgattacgattttctagaatcccaacctatttttatataatttatgtacagcatttgactacctccatatctgtaaatctagatttgtactctttgcaggtacctagctaagggcctggtatgtagtgtgcactctgtgttaccaggaccccttcctcttctttcttatctggtggtttgaggatgaggaaaatgagattggagagaaattgagttactggatgaaggccaatcaactcactagtggccaagtaggaaccccagctcaggtcatcttctgccccatcaagatgaataaaagttcagagaacagcttttggtggaagagtttattcgtgcatttatttaacaaatatattttggagagagaataaggtcactgagtggagaatgtgaggaacaccaagatttaaagtagagaacagtatgtagaatggagaagctgggcaaatgataacactaataaatgagctttctctgtaagtcaggtgctacactaactaattcaaacagattattttattgatgttttacaaataccttctgaattaggtgttattattatatccattttggatttttaaaaagttgaggcctggactaattgttaagtttccccagatgacatcatcagtaaatggtgcagctgtgattctaatcctggtaacatgagttcagagctggtgctttaaacctctacaaaatagtgaaaaaaattatgtgttttaacatttaatcttggaaatctcagattggtctacgttaccggattggagtatttttttcttgagccagttgcaaaaatattggtcttaggcagcattggagactgaaaataaccacggtgccgtaattaactagagttctgctctctcaatccaaggattagctgtgtgtattttcttctttgtattttatggttttttataacattaatattccaataactaaatctattataatttaaacttgttattattcatatatcacaactgttattattggtcatttactgtatgccaggcatggtgtgaaggcctttgcattcattatttcattgtattcttactctagcctttcaaggtatacagagaaaacagaggttcagaatagtggctcaaaatttagtgacaatgctgtggccccacattataaggatagcaagcagtgtcaggatgcaaatgaagtccatcagatttcaaagctattactctattaccctttaaaaatttgttatttatttacttattttactacacctgggggtagtaaattttcagcaataaaaagctattgctctaaaccattccactctgcccctttctgtgaaaaacagacaaatgatagtccagcatactaatttaagaaatttacttttaaaaaagagagagtaaaatcagattgtagatttatgtctggagcccatccagactaatcctaaattccgagacctttttttttttttcatgttgtaatagtggctagcattgattgagggtttattgaatgtcatgctccctgcaaagcacacaacaggcattgtctcattgtaattcccactgcaactccacaaattaagatcctgacccttagttttctactaatgagctgtatgattttgagaatatcatttaacctctctttacagatgagaaaactgaggctctgcatgcctgtctaacttgcctgagagctcagagctgcgtcagagctgatgcgctggccatgacgcctctgcaatagagcagagataattttctcccagatcatgccctggggaacttccatcacctcaatcagcaaagaatgactcacttatgtgttccctattgtatccattaaagcagaaaaatagactcatatatcttacattttcagtaacagagaatcctaatcagaaaggaaaaaaaaaaagccatagcattctatttctgagcattcttgttcatggacatttcattcagtttagaatcacgaaatcttaaggctggaagatcaaccagtctatcatcctgctttcacagataagaaaactgaggtcctgacatgtgaaaagattgatttttcttagatcacacagctaatagtagcagagcttaaactaaaatgcaagtatccaggctgctggttcagcattttttcaatttcttatgggagttagttctatgtgagcccagatatgtgagcacatttttgccctgacaatgatttctggcttaatttaatttctactgaatttagtgtatttacacacagacacacacagatacacacacacacacacacacacacacacacacacacgacgtaacactattttaagatacatataataggatttttatgttacagtgctataatcacctcctcagatttcttagaccaatgattgtctaaggattgtatcggcaggactaatttcatattaattgtgttccattatagctagcacgaaggctccatcccacatcttgattttaggaatagacagtgaggaatgccagttaataatcctgtaatgttcaataccttcaccttatatattatgtgtgtatgttttaattgcagtttgaatgatattgttgctgtgggacctgagcacttttatggcacaaatgatcactattttcttgacccctacttacaatcctgggagatgtatttgggtttagcgtggtcgtatgttgtctactatagtccaagtgaagttcgagtggtggcagaaggatttgattttgctaatggaatcaacatttcacccgatggcaagtatgtgaactctctgaaatgtagtggatttactcagattctcaggagatatcttggaatatattctttttttaagtaatatgatacattttaacatgttaccctagtgagataaaattaggaaaaatgtaaaatgtcttaatttttcagggggtgaaatttatcaaatcaaaaatttcattgtgaaggcatactggttttatttcctttttggaaagaaagtacattttaagagggggaactgtgatgaagatttgatatgtctgaatagctttgttttgagtaaagatgtgagtgtataatgagttgaatagtatgcaggtatagatacgtcagtagtgcaggtttatgacaagatgaggaatttgtaccaaaatgtaaatcaaggcaatacttccttcatcaagaaagtattactgtgaaaaacaagtcagtttaactaagcagtgtgcttagtgatgtatttgatttataatgttatctcatggtgagctataacaaacaatttgcaaaccaacattggtctggagactgcattttgggtagcattggtatatacatgaaatatctatatccatccacatatatgccctttctcatcttgtgtcatcatcaaggattttagagtccgtaacatatgcttagagaaagcaacaggggccaggtgtggtggttcatgcctgtaatcctagcacttcgggaggccaaggtgggtggatcacctgaggtcatagaccagcctggccatcatggcgaaaccccatctctactaaaaatacaaaaattagccaggcgtggtggcgcactcctgtaatcccagctaccagggaggccaggcaggagaattgcttgaacctgggaggtggaggttgcagtgagctgagattgcaccactgcactccagcgtgggtgacagagcaagactctgtttttttttaaaaaaaaaaaaaagaaagaaagaaagaaaagaaaaagcaagcaagcaagcaagtgagagcaacagggacagggacagcttttaattattcatatcatagaccagttttcaaaaaatagaagataattgagcagtaatttcttttttttgttggggggatgcacagtgcttagactaaccccagatctttgtggggtatgactaaagccacagggtcaggaccacactcagggcagaagaggaggaagacttctcttgatccaagccaagcagcttttcttctctcatattttctctggattaaaacaaggggctgttgtccaagggctttcctgcaactttcccgagagagaactcactagcccctgaaatgcagaacctgggccttgacactaaattgtcaaaccaaaagagaaacgctgtaatgcattttactcccagatactaaaagttagtgttagggctaagttcctcccatactgataaggacaactatgtcccctccttcagaaacaacttttcagagattaaacccctctgtcactgtaaactcactgagttctttcagaatttggtgtgtttgaggtgggttccattttccattccttaagcaaagttcttccctatgaataggtattacaacttcatcttaatctctcaagttgtgttacttctagtactttgatgtagctctttcttctttgaaggtatgtctatatagctgagttgctggctcataagattcatgtgtatgaaaagcatgctaattggactttaactccattgaaggtaagacgtattaacactgtaagtctgcagagtgataattagattctaattgatttgtgaaattaaatgtgaagaaaaaaggactgcttaattggggtgggtgagaaccaatttttcactcctttattaagagtcattagcttggttatgtgtttgttgttcatttttactcaactgcagagtggcaaacagcaaaccccacctcttacccgtgaaccttgcattctttctgctctagcaaattttaagcttggcattgtgttcccagatcctccttccatccctcccttcctgcctttcttctgatctccctctcctccaccttccttccctctcctcccttttctttctcttttttcctctatgttgatggaacagccaagaaatagcctcaaattgtactttatgcagggctgctctccacaatgtttatgaagtccacgtgctcacgatggctgctaggtgacctggctgcccctcacctctctgcctttacctccaaccattgtgtccctgccccacgtctcctgccactgtctcagaacggggcaccattccctctgctaggaggagaaaccttcctccagatctccatgaccccctccttcatctcctttcatttttactaaaacgtcacctcgatcttcaaaacctggaactgctccctcccgctacgtattttccctcgcctttcctgctttatttttccattcagcacgtattgctaacatactatatattttattcataccctttattacctgattccccaactagggtgtaagctccacaaggacaggctgtttttctatttgcttctggtacaattcacattgactagttggcacttaacaaatacttgttaaattactgcggtggggctgggcatgcttcagggattcacctgctgcccccaccaattctggtcatctgaaggttggagtcaaaatgggtgaaaacacaaaggagaggaaaaagagaccaagagcaaactagagccctaagaaagcagccctctacctccgaaaaacagcaagacgttgctttcctgccataaacgcccactgcaggaagcactgtcagcgccaattgtatgactgttcctgtcagcacatctgagagactgtcatgaggggcctcactcagagaaaattaccttaaagcaacatcaaatgtaacatcgtgtttgacattaaaaatcactggcagggctagtttggtattagctcaagtaaaatggaatttcacacgctcatactggctaagggaataaaaaacaagctgcggttttaacaacaggtatttctgtaaaacaaaagttaaagaattttatgagaatagaacccaatgtaacagacattcaccacagaatgtcaaggctctgctctcaccagggtgagactgagggcaaggccagtttcagcaacagaccaggcctgtctcccatcatgaaaaccccaaaaaggttctccatcaattgtcacattattctttcttttgaaagaccgtattaattaatatcagttaattaatgcccgagagtgccaagtaatttgataaactagctgaggctattcttaaatttgtgatgaggtgtggatgggtttatgtccaattggatattgttcagccttaaaaaggaatgaagttcttggccgggtgcggtggctcacacctgtaatcccagcactgtgggaggctgaggtgggtggatcacgaggtcaagagttcaagaccagcctggccaatatggtgaaaccccgtctctactaaaggtacaaaaaattagccagacatggtggcacatgcctataatcccagctacctgggagactgaggcaggagaatcacttgaacctgggaggcggaggttgcagtgagctgagatcacaccattgtactccagtctgggcaacaagagcaaaacgccatctaaaaaaaaaaaaaaaaaaaaaaaggaatgaagttctgatacctgctacaacatggataagccttgaaaaacatgatgctaaatgacataagccagcaacaaaaggataaatattgtacgatttactaataggaagtacctagaacaggcaaattcatggagacagaaaatagaatagaatggtgattgctaggaacttgggggagagaagaatagggagctattgtttaatgggtacaggatttctatttggggctgattaaaagttctggagagggatggtgatgatggttgcacaacattgtgaatatacttaatgccactgagttttacacttaaaaatggttaaaatgtcaaatttttatatattttaccacgatagaaataattctctcctctctccaaaaaaagattccaggacttagtcaatgaattagtcacacttcaatgaacctcaatgcgcaaaaacctggaatatttgttaacagagaatactctgtttttcccaaagagaataatttattatgttttcttgaccaaggaatgcgaatttttcgagttgcctttgtgggagtgtgagatgtgatacgcaggggtcttgcatgagttagcatggagaggaattatttatttgcaaggcaaagagttcattgctggactcagaacaggctccctgctagactgtcagcacttccatggcatgagctgtgtctgctgggtacctggtgctctccaggtgttgcgttccttgcagagctcatgtaggagctcagtaattgtgtcttgaatgaatgggaccccaggtttctgtgtccttctcccactcccactctcatctcaggtttcatctgccgtggaattcaccaattggctgtactgcttccaaagataagagcaaagccctgaaacaaacattttcctcattcaaagacattatggtatcagagtggtgtgctgacactgggatggacaggggtttagggatggagaaagcaagcatggagccgcctgtcttgcctgtctctggggtaagaaagactgatggctctgcatggtggcgagactgaggctctgccatgatgcttgagccctctaatccctccttgggcatgtgaggaacagctctcattttgagtaggaggcacagggaaacgttggttttctgcagctgtctgcttatgccctggctttttcaatgagtcatgaccagttatttacaggttctctgggcactgaggtatgctggcctctgaggtacatggtagatattatttctccaactgagaattagaggtaaacaaatagatgggatttctccccagtagaaggcagccaagatgatgaatggtggaattaagaatcattggtattatttatgatccttgtacaaagcctcgacagcaatctgtgcagtcatcaaatgcttgcaacttatatttagagaataaacagcagaagaacggggagttgaacaacatcaggaaactaaagaacaaacttttcctcaactacaaggcaaaaatgagaccctgggtgatcatttcttctctggctgcacagcctatgattagccattaaagagtccacatttcattgatattcttctgagaaagaatctacatttcctggttgttttctgaatgcttataaaaatatcattaccacatgccattttagaaggagatgttttatgatgcaccgaaaacttcttttttttttcagttttaggttcatgcacagatgttggtacaaatgattttgtctaacttttaacagtctttcttggctttctgtatcttcaccctacccaattctgccctggaaactgacaaaatactagcatagatgaaaggtcagagaaattttgtgagtcttattgaaatggggcagaattgtatccttggaagcagcagcgtggtgaccaaggacaagaggcaacttttctctgatatattttgctccatcacaattgtgttttactttatgtcttgttcttttcttgtttttaatcttttaagtcccttgactttaataccctcgtggataacatatctgtggatcctgagacaggagacctttgggttggatgccatcccaatggcatgaaaatcttcttctatgactcagagaatcctcctgcatcagaggtaagttttaaaaatgaaccagataagtgactttattcccagctactgttttttcagttgacaacataattctcaattcttggtttttttttttttttttttttttttgtgacagagtatcgctctgtcgcccaggctggagtgcagtggcgcaatcttggctcactgcaagctccgcctcccgggttcacaccattctcctgcctcagcctcccaagtagttgggaccacaggcgcatgccaccatgcctggctaattttttgtatttttttttttttttagtagagacagggtttcatcctgttggccaggatggtcttgatctgctgaccttgtgatccacccgcctcggcctcccaaagtgccgggattacaggcgtgagccaccgtgcccggccaattctcaattctatgtgcaaataaaaggggggacatggatagatgatccaaatgatcagaaatgaaggcttttggaggtgctttagtcagagtctaggcaagaaacacatggcacacttaaattggataatttgaggggagtttaatcaacggactatacacaaaatgtgtggacacagtgtagggtaatcaacagagttataatgcagtaccccagggctagcaagggagggaggaaatgaataccagaagccagaacaggtagacggtggtgggtggagagggttgcctgacaggaacttggcctctggttaagggatcctcaaagaacataatgatgccatactgctatggtttaatcattcattacctgccttcctattcaactcccccttcctgtgtggcggtatacgcacaggtccatgcaatggaccagtcctggagcacactggccagcctctctagatcttcctgcaggtggcaagataaatagctggaattattctggcttagaagatctcatcttccaccttagttacagtactcaaaggtcccattttttgtccacggtctttattcagtgaactattttgggtacaagtaagaatttgcaacctacttcaatataggtatttgcacatttactgagttttcagtatctactaaggatacttattacttacatcatatatatgatatcatcttgacatatttgtctactgctgtgtattgttaaagctcagttttaagagtccatttcacctgcccaacaggaaaaaaaaaagtgttaaagcccgtatctcttgggttaaaaaaaaaagaaacaaatgtgtatttccatttacattatggctctcttaccttttatctctaggtttgcaggacaattgtgatcatgtttaatggcaaccctttgtgccttttgctagtttttagctattagggttgctgaatggtatgtttaatagaattgaagaaatgtatgctgtggagtgttcagtgctcagaactgagcagaatgttagattctaatttgttcttgcttgttagctcatttagtaaccttgggtcatttgctatagcatggacttggtttgttgttctggagaaaatacttcatttctaatgattgatctgcaaaggagtagcaaaaagtagtaacaattccttatccaatgcactgcccctagatgagtgatttagttttattaacaagaagcttagctaagccaaggtgtaccatcaactatttccctgtaactactacatgttaatgctatggcaacttcctaagacatctgtctttggtgccagctgtttttaagaggtcattttgaacgttcccacagacccttttatatccacgcagtggccttcaccgtctgccacatttgtgatgtagatatcctttcttcaagtcattatatattatcataaaggcttaataatagaaagctagagctgaaggggaatttagagataatctagtcccacccatttcattctacagatgagaaacaaatgtgagtggaagatccaagacatgacccaggtctcccacctcagtgtagtgcttttcatactaagttgaatcacacgctattgctattttttacagtcagaatgatcagatattggctatttcatatggttggcttaacatgatactacactgttattattgatacaatcacatttctcctcaattaagtgaaggaaactgaacttacaaaatcttatacatttagagacaggaggttaagttcagaacacatgagtatggtacacagatatggttttttgagggccacattttttttcttgtctgcattttaaaaaccaggaattaagtgtaaacatccagttagttccctggcttacctgaaaatacatgaaaacggaccttaattactgcatggcaacagtttggctattgctgagtgtattagtcaaggttccctagagggacagaactaataggatatatatatatgtaaagggggtttattaagtattaacttacctgatcacaagatcccacagtaggcggtctgcaagcctgaggagcaaggagagccagtctgagtctcaaaactgaagaatttggagtctgatgtttgagggcaggaagcatcagcatgggagaaagatgtaggctgggagggtaggccagtctctcctcttcatgtttttctgcctgctttatattcgctggcagctgattagattgtgcccacccagattaagggtgggtctgccttttgcagcccactgactcaaatgttaatctcctttggcaacacgctcacagacacccaggatcaatactttgcatccttcaatccaatcaagttgactctcagtattaactatcatactgagtaacagcttcctccctccacatttactgaaatccccactgctccctaatgtcccacatccaggatgcgctgctcatttgcatttcctgcctcatccctgtaggtctagatactctccacctctgctaaagatcacttgagatcagtacccacctgttcccaaatgaagaaacaggtgtgttaagtgtaattttggaacaaaataggatttatctcattgtataagattatatggcttcttatggaggatgaccctattatgcataaggttgttttaagtgacttaacaaaaatattaacccaatgttatttcttccacaggtgcttcgaatccagaacattctaacagaagaacctaaagtgacacaggtttatgcagaaaatggcacagtgttgcaaggcagtacagttgcctctgtgtacaaagggaaactgctgattggcacagtgtttcacaaagctctttactgtgagctctaacagaccgatttgcacccatgccatagaaactgaggccattatttcaaccgcttgccatattccgaggacccagtgttcttagctgaacaatgaatgctgaccctaaatgtggacatcatgaagcatcaaagcactgtttaactgggagtgatatgatgtgtagggcttttttttgagaatacactatcaaatcagtcttggaatacttgaaaacctcatttaccataaaaatccttctcactaaaatggataaatcagttatgtcaattgtcagatattaaataacagtgtgtgaccccaaaagtacttaccctaaaacatgtgttgcctggaagcacatgtgtgtatcgctgccttgccatgtcttgttcagaagacacaggggagcagggttagctcacgtgtctttagaactccagtactcacccagggactccagttcacaggccagaaaacatatgcattatgaagttcccctctactccatgcacatagtaagtctgactatggcagtcagacttacttactcccattttcccttcgatatatgactttttctcagtaaatattaacctgaattattccaactccccttgtactcttgctttttcaattctcctgttgcaatgacacataggaaaatcttaaaattcttgggagtgttgtcacacctgaaaattatgagtctctatgatcttggcacaaattgtacatttgagtgtctttgacttggttaaaggaagtttgttcacttcgatgactggatacagaatgaatcccataattgacatgggcgaagctaaaagtgtccccaaagactacactgttgttgaggtggtggtagtgctggtgggtttttgtttaatatttaaacttcttgttgtggaggctgaaaagaaaaaaaataatagaaaggtaaacaaacaaataaatagaaaagatcaacaacccctttggctatctactgagacatgactaggaagaaaacatgactttatcattttgttatagaaactgatatataaaggttacacattttcatttatttgtttttctgatttgaaggtataaccttcatgatgaattacttcttcagggtgttaaggcagtgactttagaaacaaatttttttcttgtttttgttttgtttttgagaccgaatctcactctgttgcccaggctggagtgcagtggtgcgatcttggctcactgcaacttctacctccgaggttcaagagattcttgtgcctcagcctcccggatagctg

SEQ ID NO: 146 - DNA, 36388 bp, Homo sapiens
atggggaagctcgtggcgctggtcctgctgggggtcggcctgtccttagtcggggagatgttcctggcgtttaggtgagtggcatcttgacagggcgtcttcgactctctttctctcctcttccaagtgaggtcaggggctgcctggcgcccccttcctagcgggtaggaaagagcagctttggaacctcactcctccatctcacccagcaaaccgccccttgagactcgcttatggggaaagtgagctacttgcgtttccaaagactgccgagccgaattagtcccatttattttttgaaggttatgatcccccactttgctttctgaaggtcatgacccccttttactttctgaacgtgatgacccctttcccagctcgccctcaacattctgcttgggaaaaaaggacgtccattggaaacgccggacttgggagagaggatcaggctaccagttggatgtttacggctgactgagacattgcccaggtctggctaaccatgcagaagtactgggttatggaacctatcctagatttaaagagctggccagacagcagggcaaaccagctgaaacctgcaggcggtaactggcattttgtaggcatttgaccttttgaagtggaagatacaatggtgatagccagcctagaaatgtctcaggaaaagtcaatactgggctagaaagaagaacctttaagtgataatacacattcatgagtggatcgaaagcctctgcttgctttcagttgtctttgagtgtttatgtatttctcttagttgaagctggtcttcttagaggatcacgtctagaatctgttgaggtgcctggtgcctattagtaatacttccagtttgagagttttattgttacatttgctcccagtgcaaccacatggagaatcataaaataatagtaataataataaagtagatctaagggtatttttttaaataaatgactgtaagataagtattgagtctttctgaatatactttaataaaaattttaaattatccctgatattagaagaatgtggaaacattccttttcactctggaaacaagaaaattgtgttgaaaaataaatcggccaattgtttaaattgtggttggtttaatgaatttacatacttgcggagtaagtcagcataaaatttaaaaattaaagcaaaagtgatagagtttgactattaggagaccctgttgaattttgggaaagcagtttggaaggaaaagttcaaagggcaagactgtaggggattaagtgcagatttataacagacgatactttagaaaattagggctatttcgtgcatttaaattaataatattgttcaattactcatactattaaatagtgtcttttatttgggcagcagaattttccatgttgaatcatattatacagtttttcagcaataactgggtaaggttagctgatataggtaaaatacccacataatgtctacattatgtaaataaacatgaaaggaagtacctacttacttgttatgtcattcataaattatgataaagatagttaaccaacacgaagatgattgaagtccacatttaaacatacattttgaatgctgtgccttgacttccagggttgggttttatcttctacagagaaagggtgaatgcctctcgagaagtggagccagtagaacctgaaaactgccaccttattgaggaacttggtatgtatgtgacagtaccaagaggagccagcacagcttcttggtcgtcatccacctgactgagccctaccagctcatttaattacctgtcactacttaagccctcccagtgggacatctgccccgtccactctgccccatgcaaggtcttcaggggtgtactaaatgacattctttgtgggtttttctcagcacatttccttactgacatctctccacattacctaaagaatgtcattgaccactccctggttttcccctcactgaatgcttctcctttcccatctgtggtatttcactctcctccttgtcctctgttacctttcctttttttgcttctttcttctttccttcctccctccctttccttattgtcattcctggcttcaagtgttattttttttcaaataatatgactcagcccctcccctcaagaacctcacagcaggctgggcgcagtggctcacacctgtaatcccagcacttgggaggccgaggggggcggatcatgaggtcaggagatcgagaccatcctggccaacatggtgaaaccccatctctactaaaaatataacaattagccgggcatgttggcggcgtgtgcctgtaatcccagctactcggaaggctgaggcaggagaatcacttgaaccagggagtcatcggaggttgcagtgagctgagatcgcgccactgtactccagcctggcgacagagcgagactttgtcttaaaaaaaataataaacgaaggaacctcacagcctacctaccttcttttaaaaaaattcataaaaaatccatggcccagtccctaacctttcaaactgcagcccttcttttttagtcagttaaagggcagctccagctcaaactctccctaagctgaaatctattttacatttctgtcgttttctccctcatcctcccacccacaaccagctctgcttctagacttttcctatgtatggtacccccattctcaaaagattcagttcaaaatccaggaaccattgttccccgcttgtccctcatgcttctacgtgagacatgggctaatctcacctactagttaatgccacacctgcttatttgggctccacagctccaattcttcctgacattgctaacagaaaaataaaataaaatcaggctagattgtgttccctgttctgggaatatgttctttcaccttctcacctttgcttatgaaattccctccaaacttactgattcctctgtctctgcttactaaaatcagctgcaaaattcatctccttcctctgaactctcacagcactctgaagctccgattcacttatgacacctgccacatgccttgtattatagctagcagtgttctctctttcactatcagattgtaaactccctagggccaagaactgtgacttatttattagaatgtgatgagatagcttattttgggatatgattttctattttattgctatatttaaaaatacagaaaaagtacccttttgatttgagttttctgccttttcttgcctctcaatttctaaaaaataaagtaatctgaaccttgcactccctagtcttagaggtggtttgtgctagcagctggaaagcagaagaaaccaaagaaaacgcctttcctgaattgtttttaaaaacctgagccccttcaagggattctgttggagaagggatatgaatatgtggatatctttgaataatggggatccttaccccactggctgacagcattctgggagaggagcaggacctcagaaggaatggttgcaaggtatctttagggacgctggaccctgtgttccagctaaggtaaagaccttgtgtcaatgcattacatggaagtagcagaattgtctaaattaaagggaccagtaactttggcaatgaataattcgatgatacgtagtgtagaatgaatgccagatggcctttccaaaacattctgcttaggtttagaacccaccacttaaaatgatttcataaccctaacagacaaacccagtaatgactcagattggattttccatcaacttagtggaataggatatcagagtgatttaatttgattttaaaaataaggaaatgtgacatttactcatttgtttactgttttgtggtgtagtagtattcatattcactatacaaataactgtcaaaatatataagcctgcaaataatcaagaggtataattagactagatgattggtagggtctagtctgactcgaattgtatcactcaactagatttgagaaggtaaaattacagttaatattgtgagtcttaggtcaatgttctgatttgccaaatattttgaagaaaatggcttaaatagttggaagcaggctgggagcagaagaaagaaatgccatgttacttctcatgtctattggcatatgtttggtgaactaaacaagttagaatgatgatgggtcatgtgtcagtaggacaatactgatatatatgttttgaaaaagctgctttatcaaaggcctggtgactatgagcagcctgttgagtcctttacaaacatctacatcatcctcataaccaatttgtaaagtggatgctgctatctatgctttgcagattaggaaattgacatacagaagaattaagttgcttgcccaatggtccggaactagggggtgatgggcttagcttatgagccaagatcgtttccttctatgcctttttactctctgttgtgtaacactaactttctgatctactgacaacacattttttattttggaagcttcaggaaagtattgcaacagtggaaaacagaaaatctgagatgcaaacagctgaaatattactagatacaggttaatcaaaacaaggcagtctagatatttaaattaagataatggataagataatactcacaaatcacaactggttgaggagtagaggctttacaaagccctgaaaagctgctgaaggattttaggtagggtatagtaggctgtaacagagctggagaaaaattcttatttgtgttttcaagacccagacttttgaggtttattttattggtagaagaaactcttattttgttttccttctccagcatttttttctgggaagaaaagttgaaaggtgaaatatatctttctctggaaatcatatctcatagatctttttgtattacgttcatctttttatccaaggcttttgagggtcaaggattgttttaaccaggacgttatctggctgcccttgacatctaatcaaagctgcacttgaaatatgaatacttcagtaggactttcactaggcaggattatcgagtaggtggcctctgtatttaatacctacgtatcttctcttccactcctttccattctatagcttcccatgtctccaatatatgcttctactccataataggttccatgtgttttcttagctggctatcagaaacttctctccaagatgtgaagtgacgataataaaattaactgatagtaatgctttgatgtgatcctttatcagagtgcctgtaggggatgactggagaaatgaagaaaagagtaaagaaatgaagttatgccaagtagcagtagggttgacaggctaagaagcagtaggcacctattcataagactgattttagacttagcagtgggattttaatgatagttgtgcataggctaataagtgtgtgggaaagtctcagaggaaggtatcctgggggcttttgctcccacaggtgccattgttgctgagatgcatggggcctgtcgtgcaggcgtagtgtaggtgacagctcctttttcaacttgttctcagtcaaaacttacttattatatgtctctttccatagaaaaaaatgctgaaaactagctcttactgagaaaaaagatctaactaaactttcatattaatattcagtaatctttcatattcatttatactcattagtttattactcaataatttcccaatatgattgtataatgtagcgttttaggctttacgttggaagagaaggaatgcttggcagagaggcctgtaataaaagaccttcacgattatgactttccagattttatcactgagtctatagagcagccttctatgggggataaagctgaatctctcaggatatgccctggaaattgttacttaaagagtaaatctaggatatgagtttattttctaggtatttgcctttttctcctgaaaatggggttctaaaaaaggatttagtatttgaggagtctgactcaagctttactatagagtagcatgcctgtgagattctccaaagttaatatggtttcccaagtaaatggttgaacaagtcaacaatttccaaaagaagtttccaaaagatatttgtagtttggactgtgagacgtattttttaagccttcatatatgcatttttctgattctacccttcttttgcagaaagtggctctgaagatattgatatacttcctagtgggctggcttttatctccagtgtgagtattttccatgctgctctcatgctcacatcaatagctgtatagacagtgcattaatgttgtcctctggagctgccagatggatccctatgctctcatcccacctccgggtaaaccagtcaactaaaaaagccaaaacagaattttggagggctaattagaacaccacaggaatgcccagctttgactgcctcatggtgggcaactccctgggggtagtggcatactcagtagggtcttgataaatgtgtattgatttccactcgattcctaggctagtctccagttctgtcctattgctatccattctcatcattgccctatttgactgggcttccgcttctggtagtcatcttcccactaactggtattcctctcaccatgtctgcctttatttggagctctgcaaatgtttgtggatcgaatattaaccacgttactcgatttaaaactctaaacacgttccatcttgggttccctgccattcttaacaagtctttcaaagagaaatagagaacagactgcattttaattcccagtactgtcttcacaggaataatcaagaagttacaccagggacagcatttcggtaaacaaacaaaaaaatgtgtatttatgagatgttgaaatttttcatatattaatatttgttaaatcaattgcattttgaaatggggatatgattttgaaaaagtatatttaccacattttcaatgtgaattctgattgctggaattggatgtctaatattccatttggggcaataaaataccaccaaagaacatggattttgaatttaaatatttttggccaaaaaaggggtacttataataaccgtggcctgaatttataaattcataagtacacacagtagaatagagtgaggctctcatttggaccttaaactgctgctggtgtcactgctggaactggtgctagtctgtgtgggcaatattttatttctttatttttccatcaaaatcaaggataaaacaaaatggtctagaaaagttttttccttgttgacctaaattttctattgtcagtttagatttttttttattatacttttaagttctagggtacatgtgcacaacgtgcaggtttgttacataggtatacatgtgccatgctggtttcctatacctattaacttgtcatttacattaggtatttctcctaatgctatccctcccccagccccccacaccctgacaggccccagtgtgtgctgttccctgccctgtgtttatgtgttctcattgttcaactcccacttatgagtgaaaacatgcagtgtctggttttctgtccttgtgatagtttgctgagaattatagttttcagtttcatccatgtccctgcaaaggacatgaactcatcctcttttatggctgcatagtattccatggtgtatatgtgccacattttcttaatccagtctatcactgatggacatttgggttggttccaagtcattactattgtgaacagtgctgcaataaacatacatgtgcatgtgtctttatagtagcatgatttataatcctttgggtatatacccagtaatgggattgctggatcaagtggtatttctagtgctagacccttgaggaactgccacacggtcttccacaatggttgaactaatttacactcccaccaacagtgtaaaagtgttcctatttctccacatcttctccaccatctgttgtttcctgactttttaatgattgccattctaactggcatgagatggtatctcattgtggttttcatttacatttctctgatgaccagtgatgatgagcatttattcatgtctgttgactgcataaatgtcttcttttgagaagtgtctcttcatattctttgcccactttttgacggggttctttgtttttttcttgtaaatttgtttaagttccttgtagattctggatgttagccctttgtcagatgggtagattgcaaaaattttctcccattccataggctacctcttcactctgatgatagtttcttttgctgtgcagaagctctttagtttaattagatcccatttgtgaagtctttgcccatgcctatgtcctgagtgttattgcctaggttttcttctagggtttttatggttttaggtcttacatttaagtctttaatccatcttgaattaacttttgtataaggtgtgaggaagggatccagttttggctttctacgtatggctagccagttttcccagcaccatttattacatagggaatcattttcccattgcttgtttttgtcaggtttgtcaaagatcagatggttgtagatgtgtggtgttatttctgaggcttctgttctgttccataggtctatatatctgttttggtaccagtaccatgctgttttggttactgtagccttgtagtatagtttgaagtcaggtagcaatgatgcctccagctttgttctttttcctgagaattgtcttggctatgcgggcccttatttgattccctatgaactttaaagtagttttttccaattctgtgaagaaaatcattggtagcttgatggggatgacactgaatctataaattaccgtgggcagtatggccattttcatgttattgattcttcctatccatgagcatggaatgttcttccatttgtttgtgtcatcttttattttgttgagcagtggtttgtagttcttcttgaagaggtcgttcacatcccttgtaagttggattcccaggtattttattctctttatagtaattgtgaatgggagttcactcatgattggctctctgtctgttattggtgtataggaatgcttgtgatttttgcacattgattttgtatcctgaaactttgctgaagttgcttatcagctgaaggagatttgaggctcagatgatgggattttctaaatatacaatcatgtcatctgcagacagagacaatttgccatcctcttttcctaactgaataccctttatttctttctcttgtccaattgccctggccagaatttccaatactatgttgaataggagtggtgagagagggcatccttgtcttgtgcaggttttcaaatggaatgcttccagtttttgcctattcagtatgatattggctgtggatttgtcataaatagctcttattattttgagatacgttctatcaatacctagtttattgagagtttttagcatgaagggctgttgaattttgtcgaaggccttttctgcatctattgagataatcatgtggtttttgtcattggttctgtttatgtgatggattacatttattgatttgtgtatgttgaaccagccttgcatctctgggatgaagctgacttgatcatggtggataagctttttgatgtgttgctggattcggtttgccagtatttttttgagggaggattttcgcatcaatgttcatcagggttattggcctaaaattatctatttttgttgtgtctctgccaggctttggtatcaggaagatgctagcctcataaaatgagttatggaggattccttcttttctattgattggaatagtttcagaaggaatcgtcccagctcctctttgtacctctggtagaatttgtctgtgaatccatctggtcctggactttcattggttggtaggctattaattattgcctcaatttcagagcctgttattggtctattcagagattcaactttttcctggtttaatcttgggaggatgtatgtgtcgaggaatttatccatttcttctagattttctagtttatttgtgtagaggtgtttttagtattctctgatggtagtttgtatttctgtgggatcagtggtgatatcccctttatcattttttattgcacctatttgattcgtctctcatttcttctttattaatcttgctagtggtctatctattttgttgattttttcaaaagagcagctcctgcattcattgattttttgaagggtttttcatgtatctatctccttcagttctgctctgatcttagttttttattgccttctggtagcttttgaatttgtttgctcttgcttctgtagttcttttaatcgtgaataaccagatagcatcatggtgatggatcaaattcacacataagaatgctaaccttaaatgtaaatgggctaggtgtcgattttagatctttcctgcttcctcttgtgggcatttagtgctataaattcccctctacacactgctttaaatgtgttccagagattctggtacattgtgtctttgatgtcattgatgtcaaagaaaatctttatttctgccttcatttcattatttacccagtgtcattcaggaacaggttgttcagtttccatgtagttgtgtagttttgagtgagtttcttaatctggtgttctaatttgattgcactgtggtctgagagacagtttgtgatttctgttcttttgcatttgctaaggaatgttttacttccaattatgtggtcaattttagaataagtgcgatgtggtgctgagaagaacatatattgtgttgttttggggtgaagagttctgtgtatgtctatgaggtctgcttggtccagagctgagttcaagtcctggatatccttattaaccttctgtctcgttcatctgtctaatattgacagtggggtgttaaagtctcccagtagtattgtgtgggagtctaagtctcttggcaggtctctaaggacttgctttatgaatctgggtgctcctgtattggatgcatgtatatatactttttaaaatatatattttttattatactttaagttctagggtacatgtgcacaatgtgcaggtttgttacatatgtatacatgtgccatgttggtgtgctgcaccaattaactcatcatttacattaggtatatcttctaatgctatccctccctcttccccctaccccacaacaggccccagtgtgtgatgttccccttcccgtgtccaagtgttctcatcgttcaattcccacctatgagtgagaacatgcagtgtttggttttttgtccttgcgatagtttgctcagaatggtggtttccagtttcatccatgttcctacaaaggacatgaactcatcattttttatgtctgcatagtattccatggtgtatatgtgccacattttcttaatccagtctatcattgttggacatttgggttggttccaagtctttgctattgtgagtagtgccgcaataaacatacgtgtgcatgtgtctttatagcagcaggatttatattcctttgggtatatacccagtaatgggatggctgggtcaaatggtatttctagttctagttctagatccctgaggaatcgccacactgtcttccacaaggttgaactagtttacagtcccaccagcagtgtaaaagtgttcctatttctccatatcctctctagccctgttgtttcctgacttttaatgatcgtcattctaactggtgtgagatggtatcccactgtggttttgatttgcatttctctgatggccagtgatgatgagcattttttcatgggtctgttggctgcataaatgtcttcttttgagaagtgtctgttcatatccgttgcccactttttggtggggtgtttttttcttgtaaatttgtttgagttatttgtagattctggatattagccctttgtcagatgagtagactgaaaaaattttcttgcattctgtaggttgcctgttcattctgatggtagtttcttttgctatgcagaagctctttagtttaatgagatcccatttgtgaattttggcttttgttgccattgcttttggtgttttagtcatgaagtctttgcccatgcctatgtcctgagtgttattgcctaggttttcttctagggtttttatggttttaggtcttacatttaagtctttaatccatcttgaattaatttttgtataaggtgtgaggaagggatccagttttggctttctacatatggctagccagttttcccagcaccatttattaaatagggaatcctttccccatttcttgtttttatcaggtttgtcaaagatcagatagttgtagatgtgtggtattatctctgaggcctctgttctgttccataggtctatatatctgttttggtaccagtaccatgctgttttggttactgtagccttgtagtatagtttgaagtcaggtagcgtgatgcctccagctttgttctcttagcttagggttgacttggcaatgcgggctcatttttggttccacatgaactttaaagtagttttttccaattctgtgaagaaagtcattgatagcttgatggggatggcattgaatctataaattaccttgggcagtatggccattttcacgatattgattcttcctattcatgagcatggaatgttcttccatttgtttgtgttctcttttattttgttgagcagtggtttgtagttctccttgaagaggtccttcacatcccttgtaagttggattcctgggtattttattctctttgaagcaattgtgaatgggagttcactcatgatttggctctctgtttgtctgttattggtgtataagaatgcttgtgatttttgcacattgattttgtatcctgagactttgctgaatttgcttatgagtttaaggagattttgggctgagacaatggggttttctagatatacaatcatgtcatctgcaaacagggacaatttgacttcctcttttcctaattgaatatcctttatttctttctcctgcctgattgccttggcgagaacttccaacactatgtagaataggagtggtgagagagggcatccctgtcttgtgctggttttcaaagggaatgcttccagtttttgcccattcagtatgatattggctgtgggtttgtcatagatagctcttattattttgagatatgtcccatcaatacctaatttattgagagtttttagcatgaagggctgttgaattttgtcgaaggccttttctgcatctagtgagataatcatgtggtttttatcttcagttctgtttatatgccgaattacatttattgatttgtgtatgttggaccagccttgcatcccagggatgaagcccacttgatcttggtgcataagctttttgatgtgctgctggatttggtttgctagtattttattgaggattttcacatcaatgttcatcaggaatattggcctaaaattctctttttttgttgtgtctctgccaggccttggtatcaggatgatgctggcctcataaaatgagttagggaggattccctctttttctattgattgggatagtttaggaagaatggtaccagctcctccttgtacctctggtagaattcggctgtgaatccatctgatcctggactttttttggttggtaagctattaattattgtctcaatttcagagcctgttattggtctattcagagattcaagttcttcctggtttagtcttgggagggtgtatgtgttgaggaatttatccatttcttctagattttctagtttatttgcatagatgtgtttatagtatcctgtgatggtagtttgtatttctgtgggatcagtggtgatatcccctttatcattttttattgcatctatttgattcttctctcttttcttctttattagtcttgctagtggtctatcaattttgttgatcttttcaaaataccagctcctggattcattgattttttgaagggttttttgtgtctctatctccttcagttctgctctgatcttagttatttcttgtcttctgctagcttttgaatgtgtttgctctggattctgtagttcttttaattgtgatgttaggttgtcgattttagatctttcctgctttctcttgtgggcatttagtgctataaatttccctctacacactgctttaaatgtgtcccagggattctgatatgttgtatctttgttctcgtcggtttcaaagaacatctttatttctgccttcatttcattatgtacccagtagtcattcaggagcaggttgttcagtttccatgtagctcagtggttttgagtgagtttcttaatcctgagtgctagtttgattgcactgtggtctgagagacagtttgttataatttctgttcttttacatttgctgagtagtcctttacttccaactatgtggtcaattttgaaataagtgcaatgtggtgctgagaagaatgtatagtgtgttaatttgggtggagagttctgtagatgtctattaggtctgcttggtgcagagctgaattcaattcctggatatcctttttaactttctgtctcgttgatctgtctaatattgacagtggggtattaaagtctcccattattgttgtgtgggagtctaagtctctttgtaggtctctaaggacttgctttatgaatctgggtgctcctgtattgggtgcatatatatttaggatagttagctcttctcgttgaattgatccctctaccattgtttaatggccttctttgtctgttttgatctttgttggtttaaagtctattttatcagagactaggattgcaacccctgcctttttttgttttccatttctttagtagatcttcctctgtccctttattttgagcctatgtgtgtctctgcacatgagatgggtttcttgaatacagcatactgatgggtcttgactctttatccaatttgccagtctgtgtcttttaattggagcatttagcccatttacatttaaggttaatatcgttatgtgtgaatttgatcctgtcattatgatgttagctggttattttgctcattagttgatgcagtttcttcctagcctcgatggtctttacaatttggcatgtttttgcagtggctggtactggttgttcctttccatgtttagtgcttccttcaggagctcttgtagggcaggcctggtggtgaccaaatttctctgcatttgcttgtctgtaaaggattttatttctccttcacttgtgaagcttagtttggctggatatgaaattctgggttgaaaattcttttctttaatatcgttgaatattggcccccaccctcttctggcttgtagagtttctgccaagagatcagctgttagtctgatgggcttccctttgtcggtaactggacctttctctctggctgcccttaacattttttccttcatttcaaccttggtgaatctgacaattatgtgtcttggagttgctgttctcgaggaatatctttgtggcattctctgtatttcctgaatttgaatgttggcctaccttgctaggttggggaagttctcctggataatatcctgcagagtgttttccaacttggttccattctccccgtcactttcaggtacaccaatcagacgcagatttggtcttttcacatagtcccatatttcttggaggctttgttcatttctttttattctttttgctctaaacttctcttgttgtttcattttattcatttgatcttcaatcattgttaccctttcttccacttgatcgaattggctactgaagcttgtgcattcatcacgtagttctcatgccatggttttcagctccatcaggtcctttaaggacttctctgcattggttactctagttagccattcatctaatcttttttcaaggtttttaacttctttgtcatgagtttgaacttcctcctttagctcagagaagtttggttgtctgaaaccttcttctctcaactcatcaaagtccttttccatccagctttgttccattgctggtgaggagctgcattcgtttggaggaggagaggtgctctgatttttagaattttcaatttttctgttctgttttttccccatctttgtggttttatctacctttggtctttgatgatgctgacgtacagatggggttttggtgtggatgtcctttctgtttgttagttttccttctaagagtgaggaccgtcagctgcaggtctgttggagtttgctggaggtccactccgaccctgtttgcctgggtatcagcagcggaggctgcagaacagcgaatattgctgaacagcaaatgttactgtttgattgttcctctggaggtttcgtctcagaggggtacctggccatgtgaggtgtcagtctgcccgtactggggtgtgcctcccagttaggctactcaggggtcagggacccacttgaggaggcagtctttctgttctcagatctcaagctgcgtgctgggagaaccactactctcttcaaagctgtcagatagggacatttaagtctgcagaggtttctgctgccttttgttcggctatgccctgcccccagaggtggagtctacagaggcaggcaggcatccttgagctgcggtgggctccacccagttcgagcttcctgaccactttgtttacctactcaagcctcagcaatggcgggcgcccctcccccagcctcgctgctcccttgcagttcgatctcaaactgctgtgctagcaatgagcaaggctccatgggtgtggaaccctccgagccaggcacggaatataatctcctggtgtgctgtttgctaagaccattggaaaagtgcagtattagggtgggagtgacctgattttccaggtgccgtctgtcacagctttgctttgctatgaaagggaattccctgaccctttgcacttcccggctgaggtgatgcctcaccctgcttcggctcacactcggtgcgctgcacccactgtcctgcacccactgtctgacaagccccagtgagatgaacccggtacctcagttggaaatgcagaaatcaccagtcttctgtgtcgctcatgctgggtgctgtagattggggctgttcctatttggccatcttggacagatgcatgtatatttaggatagttaactcttgttgaattgttccctttaccattatgtaatggccttctttgtctcttttgatatttgttagtttaaaatctgttttatcagagactaggattgcaactcctgcttttttttttttgctttttatttgcttggtagatcttcctccatccctttattttgagcctatgtgtgtctttgcacatgagatgggtctcctgaatacagcacacagatgggtcttgactctatccaatttgccagtctgtgtcttttaatcggggcatttagcccatttacatttaaggttaatattgttatgtttgaatttggccctgtcattatgatgttagctggttattttgcccgttaattgatgcagtttcttcatgtcatcaatggtctttacaatttggcatgtttttgcagtggctggtactggttgttcctttccatgtttagtgcttccttcaggagctcttgtaaggcaggcctggcagtgacagaatctctcagcatttgttgtctgtaaaggattttatttctccttcacttatgaagcttagtttggctggatatgaaattctgggttgaaaattcttttctttaagaatgttgaatattggcccccactctcttctggcttgtagggtttgtgccgagagatcagctgttagtctaatgggcttccttttgtgggtaacccagcctttctctctggctgcctttaacattttgtccttcatttcaaccttggtaaatctgacaattgtgtgtcttggagttgctcttctcaaggagtatctttgtggtgttctctttatttcctgaatttgaatgttggcctgccttgctaggttggggaagttctcctggataatatcctgaagagtgttttctaagttggatccattcttcctgtcactttctggtacaccaatcaaacgtagatttggtcttttcacagagtcccatatttcttggaggctttgttcgtttcttttcactcttctctcatcttgtcatctcactttatttcattactttggtcttcaatcactgatatcctttcttccacttgatcaaatcggctattgaagcttgtgcatgcatgaggaagttctcatgccttggttttcagctccatctggtcatttaaggtcttctctacactgcttattctagttatccatttgtatcacttttttcaaggtttttagcttccttgtgatgggttagaacatgctcctttagctcggagaagtttgttattactgaccctctgaagcctacttctgtcaacttgtcaaactcattcttcatccagttttgtttctttgctggcaaggagctgtgattctttggataagaggcactctggtttttggaattttcagcttctctgctctgctttctccccatctttgtggtttttgtttggtgacctacagatggggttttggtgtagatgtgctctttgttgatgttgatgctattcctttctgtttgttagttttccttctaacagtcgcgcctctcagctgcaggtctgttggagtttgctggaagtccactccagaccctgtttgcctgggtatcaccagtggaggctgcagaacggcaaatattgctgcctgatttttcttctggaagcttcatcccagaggggcatccgcctgtatgaggtatctgtcagcccctactgggaggtgtctcccagtcaggctacatgggtgtcagagacccacttgaggagacagtctatctgttctcagagctcgaatgccatgctgggagaactactgctgtcttcagagctgtcagacagggacgtttaggtctgctgaagctgtctgccgccttttgttctgatttgccctgcccacagaggtggaatctacagcaaggcagtaggccttgctgagctgtggtgggctctgccctgttcaagcttcccggcctctttgtttacactgtgagcacaaaaccgcctactcaagcctcagcaatggtggatgcccctccccctgccaagctgcagcatcgcaggttgatctcagactgctgtgctagccgtgagcaaggctctgtgggcgtagaacccgccgagccagacacgggagggaatttcctggtctgctggttgcaaagactgtgggaaaagcacagtatttgggcaggagcgtaccgttcctccaggtacagactgtcacggcttcccttggctaggaaagggaaatcccctgaccccttgcacttcctgggtgaggtgacgccctgccccactttggcttgccctccatgggctgcacccactgtccaaccagtcccaatgagatggaccaggtacctcagtcggaaatgcagaaatcacctgtcttctgtgttgatctcactgggagccgcaggccggagctgttcctattccgccatcttggaagcttcctttcagtttaaattttcaatgttatgccaaatataccactaaaagtgatgattctataactaggaaatttctttactgttgtgaaataatgtttgtccttcctactgtatgttttcttttttttttttaattttcactggaactaaaagttctgaatcattgctatacaggaagtatatattttcatcacaaataattttatgagaaatgttaacatgaagttttaaataatggatctccttttgtaaatgaacaaacaacttataggataaggattctgttgttttgcttgtttctaatccttctgcactgtaataaattcaggaccttgttcttttggtttctccttttaccctttcttgccatcctagaagatgtttggaagttgctgatttggagaataattctgtgcaatagatatttctagtctatttagggatgacaaacaggatattttcttccctgccttgggacttgacatgcttctctttgactccaagattactcccttcttcacactttgccagctaactcccacttctttgtgagggttcattgtggtggcactttacttcctcaggagagtcttccctggcactctcttgtggggtgaggtgcctcttcaatgttccctcttgaatattccctcacatcccctgagtttaggctgttatagaccacaccatacttaagtgcttgctctaggtttcaagatccttgaactcaagactttggaacatgtattgacatgcccaacaccgaacatactaccaggcatttgcaagtcctcgaatatttactgagttcatgtggtgatggatgagtatagtggaagagttcattgattgtccacatttacctgtagtttgttgggaaaaataagattcctgcatgtctagatgatgattttcatcactttcaccagtgaatggtatgaaaagaattgcttacagtcattaacacacagttggtttgctgccacaaattcctacctaactgctttacacagaaaactaggtgaatgtgaagccatttatcagaagtgtttctttgatcatcacacttaatctagaccaagcttgtttgcagtgccctgcccttatctatctatcagattattttatttctgtaacatccagtcttttcactagctggctatgctccaccttcccccaagctaccaaggtacttgccattgtgttctgtcttgagctgccttcctgagcaatactgtttacttccaaacctttctgtatgtgtggcagagagagtctgaacaataaatgatctgagtgatttaggcaaatcactcttctaggcctcatttccctcatgtgaaagggaagatgtgagataagatgcccctaatatatttatatgtatataattattatatattttttatttttaacatatgtgagtgtgtatatatatacatacatatatacacacacatacatatatatgtatacatatacatatatacgtacatatatacacacatacatatatatatgtatacatatacatatatacattaaattttttcttcagtactactattatctgagccattgagcttggtgacaaattggttatggggaaaagagtagactgaaaattgaattttatgttctgatgttggggagcatagtgatgtccttaactgagaagaatagatataaatgagaggatggattcgaggggagagtgttgattttggttttgactagttgattttgagctgccctttgggaggaggttgggaaggcaagctagagttacagagttacaaataaatgtgcagacttgaaagtccttgatataaaggaaatacctgaatctttatgtataagatctgcaaggaaagagtatagagtgagaagggaggagggatcgataaaaacagaaggaggtataaatccaagagtcaggaagaggagcaggatttctatctgggaactcaacttttgacgttttgataagaaagaagaaggtatactgtagtgtcaaatgccacagagaagcagatcagaagtagaaaagttatcaaaataaagtaatttggagaccatttatatgatctttataagggtatttctacaaactggtgggagtggaatactaacttcagggaattgagagttggagcagttcacattaggcaataagatcaggtgatgtttctaagaaatttgatggtgaggggaagagagataaatgcatatatgaagaggcagtaaagttaagaaaatatttatttcaaggaaggaaaccttgtaattttttaggccaaagaagaagctgttagtgaaaaatgagtggtaaagcaagagagagagggtgtaatctctagagacagaccctagagaacagggaaccaagaaagcaggtaaaggatttaatctaagaacagaggagggacatttcttacttgagaaaagagggagaaagaaagagaatgaataaaactgaagaagaattactgggacagaaaggaaagaattataggaaattcatgttaaatgacatgacattttcagagaagtagtaagtaaagtcatccactcataataaagaggaagaaagtatgggctctagaacagtggtcccagcattttgggcaccagggaccagtttcgtggaagacaattttttccacagatcatggagggggagtggggaatggtcaagataaaactgttctacctcagatcatcaggcattagattctcataaggagcatccaacctagatcccttgcaggctcagttcacaatagggtttgcactcctatgagaatttaatgccactgctgatcttacagaaggtggagctcaggcggtaatgctcactcacctgcagctcacctcctgttgttccttgtaaggcccagctccttacaggctacggacaggtaccagtctgtggcacaggggttggggacccctactctagaagataatgaaataaatttagaagtgagacatgaggaaatccaatagattgcctatcataatgagccaaaaaaatcaataaacagtactaaatgtctggctgaagttgggatagtgactttgtagtggagtttttcaatctgattttagacttgccctatataagagctagaccaaggcaaagggagttcgcacagaatgtgataaggaagcaaagggtgtagctattgatgacgacaggattatggtctggaagcagaagtttgtggctagggacatgccaatcccttctccagatgtgctgacttaaggagaataaagagggaacagtgcctcctctgatgagcttcagtagtgccggtgttgtctgggaaaagccaggtttccctcagacaacattgggacatacgaattgggcatagaaggactgttctaaaaaaagtttgaagatatagctggggttgttcagaaaagattgactacctcaagagggagcagtggaagagccagtaatagtatcataagtgtatgtgtacgtgtgtgtagaaaggacagggagagggaaagaggcagaaagacaaggtgaaataggaaagagagaattgcaatagactgtaaaagaagataaaggtagcagagaagatataaagttattgatattgatatatatccagtgatagataggggacatggagaggaagtggactgttttgtaactggtgtagaataaaccaaccccaaggtttgtcacagtggactcagatgcagcaaaggcttcatgcattcaggatgcctattgttgattaatagctacctgatcctaatagtagaaaggaccactgtccaagttactggaataaactttttgtgatgtttgagtaaagcattcatgtcagaattttcagacatacctataggaacaaaataggtcaaaaatagtcaactatataagactggtatccttatgttaattcttagccagctatactgtttgccactacatgatataatcgatgtaggaatgggaacaatacaattaaactatacaccccttctctctgctttgaggaaggttagttatagaataccaggaccggaaataatcttataatcatgtatttgaacttcttcattttatagatgaggaatgtgaggtacgggcatgtgaagggattcacacaaagtaacagcctagtctcttctgttatatttttttggcttaactccttttctctaaattaaaaactcttccttatcttgaatatggttctttctgtgttcatagccaatgtttagatgacatcagtaacaccccagatcagatcatggaaacagctgacagagtgaaaaagcccagtaatctaaatgaaatttagaactttgaacatttttatttggctttgagattttaaattccttatgaaaatattgttttgatatgtatatgtgtgcacacttgttctttatttttaaaagggattaaaatatccaggcatgccaaactttgcgccagatgaaccaggaaaaatcttcttgatggatctgaatgaacaaaacccaagggcacaagcgctagaaatcagtggtggatttgacaaagaattatttaatccacatgggatcagtattttcatcgacaaaggtaaaacctgtatgtttagggataagggggaaatgagggaaatagaaaccatttatctccagcccctcaatatttatgtaacaggaagagagaagatgctattttaccatacagatgtgttttttttaaatgataaataggtataaaaccttgtaaacattgcattaaagaaggaacactagtatttttggccctatgtggcctcctcctcttccttctatccacttgtcttcttgtttgactgtcacaacctgtttgaatactgttctcagaaatctaacatgtaaactaaaggccctttagtttagttgtcactaaagacaactgtgagacgttaaaaaacataacataagggggaaaaaaacaaattagactcatcaaagttaaaagcttttgtgcttcaaaagacaccatcaagaaagtgaaaaacaacccaaagaatgagagatagtatttgtaaatcatatattagatgagagacttgtattcagacaatataaataattcttacaacttaacaaaacacaaataatgtaatttaaaaatggacaaagtatctacctagatagacatttctcctaagatacacaaaggcctgtaagcacatgaaagatgtttatcatccttagacattaggaaactacaaatcaaaaccagaatgagataccatttcacacccactaggatggtgataattaaaaagacagacaataacaaatgttggcaaggatgtagaaaaattggaaccctcatactttgccagtgggattgtgaaataatgtaaccactttgggaaggagttttgcatttcctcaacatgttaaacatagagttaccacacaatccagcaactctgcaccttggtgtatgctcaagagaattgaaaacctatccatgcaaaaacccatatacaaatgttcatagcagcattactcctaatacaaaaggtggaaataacccaaatgtctatcaactgatgcattcataaacaaaatgtgataggtatttatacaatagaacactatttggcaataaaaagaaatgaactactcatgcatgctataatatggatgaagcttgtaaatattatgccaactgaaggaatttagtcactaaaagccacacattatgtgattccatttatatgaagtgtccagaataggtgaattcacagacagaaaaattgttggcaggagccaggggagtggggaaggaggaatgacagctaatgagtaggtgatttctttttgggtgatgaaaatgttctggaactaaatagtggttatggttgcacaattctgtgaatatactaaaacccactgaagtttacattttaaaagtctgaattcagtggtgtgtgaattatatctcaaaaatatattataaaaacataagttatcaatataccatatatgctttaaaaacaatagtttccaatattatttttgacttgttcacagttcataatttcaaacatttaattttaaaatatttttgggtctatacagcatgaagaaaattaagaacagggaaacttcactaacagtaaccacatgaaaggaggaccaaattgaagtgctagaattccatgaaatcttatatacacttttatttgcttagcaagctctgctttaaaagataattgaatctaacaatttttcattggtttatagtatacaaactattttcatatataatggtgtctttacttctcgaaataaaatcctgggcccaaccttgacacttcctctccctggcccttttgatcaactcattataatgttttgtttaatgtatctctccaatatctctccagtctgaaatatctgtccatctctccccatcctcactgctaccagcagttcaaggccccagcatgccttccctgattctgcatgggcccccaactgtaccttccttctcataccacctcaattcattgtcatagtaaggatttctttttatgcaaatctgattatgtccctcttttcatcaaatttttcatattgttctgtcactctgaggataaaccccaaatctccagaacggcctgggttcctgggtgcttcccctgtaccttctggcacctgtatgctctccagtttcactggaaaccattctcctccagactctctggaccagccatactggatttcttttcattcagtgaagtgtctcatgcctcaggatctttacatctgctgttccctctgcctggaatgtccgtctgccacttctggctcactctttgtcatcattgaagactcagcttaaatatcatcttctcagggaagcctgcccaccatcttgttccaatttgtgtacctttctatatttcttctcaatgtacctcttttttaaaatcattcattacggtggtaactaattttttttttatgagatgaagttttgctcgtctcccaagctggagtgcagtggcacaatctaagctcactgcaacccctgcctcccgggttcaagcaattctcatgcctcagcctcccaagtagctgggattacaggcatgcgccaccatgcccggctaattttttgtatttttagtagagacagggtttcaccatgttggccaggctggtctcgaacttctgacctcaggtgatccacctgccttggcctcccaaagtgttaggattacaggtgtaagccaccactcccagcctacagtagtaacttttttttttaaatgttaaaggataggaattttctttccctctcctgctcttgctctatagcaagttcctaaacttaactgttactcttcaaatgaatgacactctatgaagaacgtgtctccccactctagtattctttgttttaatttatttaataatttttcctccttgttttcctctctcaaatataatcaccataaaagcatattgatttgtccattgctggattctgagagtctagaacagtatctgatgcacagtaggtactctatgaacacatatcaaatgaataaataaacgaaccctataggacaggcagagcacatagtaatattcaactttatagatggatacaatgaagtttagaggaatgcagtgaagtgtgacttcacttctgcaattagtaaatggctgatccagaactcagacagaggaggtctcacttctaatcctgtgtcttttactaaaatgagattaggactctatttaaataattttaaaactgcaactgttttgcctcacactgtacaagacataagattctgcattggagatggtataataagtgattagatttacctgaaactatttcattgcatgggatcatattagaggtagaggtggaggtgggtttggggctttttttctttcttttttttttttttgtttgtttttgtttttgtttttgagatgggacatgtttatacaataacagtcatataatcaggcttccataagttgagtatattatgattcacagcttatcttatttgtttgtcatctcccttaattatgtatttaattcataaggccaaaatattacatatagaaatagagatggaatgaggagatggagaagaaaagtactctcactaagtatatcttatttggaaagagggattcagtagatgcactagaagaaatgaaatcaggctagcacaagtgattgttcactattgtgtctagcaaaagactgaaggtccgtgttggggctgaaatccaacccatgttctgtttgccacgccctgagccttggaacagagctggatcagaccagaaggaagatttcctctgtgagcaagcacctttccttaatttgcatcaaagtgcccagtgtgtttcagaggtcctggttatgaattttgcatctcagggtttgggcttgttccatcacgtgcttaaaaactacatttgggaaaggaatagggaagatgaatacagatcaagtcctacagtgggaggatgggaccagaccctttaaaactccagagctcatcaaacctagaactcctgataagtcagaagacagcattctcagaggccaaattactaccctcaatcttgttcacagcagttcacattccaattgaaatgggtaggtgacatttctgaggtgggtactacctagaattagttagtttgttttatctcgcattcatatttacatgccatgtccattgagctcactaaatattgttatgttggcttgtgtcagaaattcattgtctagctgggaaatgttgcttattttaaggtgtttacactgccctgacattcactgagcttctgttgcaatgtagataattattgtacacacacaacatctcagcaaagttttgtttgcttgcactcacttctcttgctgaagggccatctggggaaaccacatccctgtttatgcatcattatagttctgtaggctcctgttagacaggttatgcatataagggtgaagtgactatggcaaaacatcttggctctgccactttgtggtgatgaaattgctgatggatcattcgcctcctgagcttcaatttcctcaactaaatctggattctggcatttgtctgacttacctatcatgtagactgtgagggtaaaatgcaagatgtaagaagaaaacttttggaagtgaccaagttttaaaacaagtctaatattagttgtgataggggtaactttcttggaaattatcccttttttccatgtagacaatactgtgtatctttatgttgtgaatcatccccacatgaagtccactgtggagatatttaaatttgaggaacaacaacgttctctggtatacctgaaaactataaaacatgaacttctcaaaaggtatggaatgaaagtattgtgcggttctatttactttgcacctctgctgtgtgctttgtattttttggttcagcaggctttcttaaacttttgttttgaaattgttttgatttttttctaaagctttctaatgattcccatggtgactcttcccagcgcctcactagaaattgccatgttaggtattgaatatgcctatattttcgagcattttgaaagcattttaatcctataaaggtgctcaattaaattcccagctctaattccattctctttaccacggcaactcaatacctactatcggtctctgtttaaacacctacacccttttttggttgtcctagtaggttgtgttctgtgagcctcacccactgggtgttataaccaacctccagatgagccacttctttgtttaattacagctttaaagtagaattttttaaaagtccttgggcacttataaaaattacatttgttaagcattgactatgtgccaggcactatgccagaatacttaatttaacttaattctcacaaagcctttaataataggcatgggtaaactaagacttagagaaggtttgggttagataacttgcccaagttacacaatttgtaagtggcagaaacagggtataaacccagatccatctgaattcaaagctgagctctcaattgcaatgaacatctttcttactgcattcattaaaataacaggcttttcagtggagaggctgcctgtttaaaggctgtagcaaacaataaagaattcatcttttatcaaatgggcttaacattaaaaaactggctccaaaacagtaaattgtttcatgggatagaagaataggaaaagaaaagaaagttcatcttctttcctttgctctctttctcaacatcatgtattaatttctccccacagaatatgggggaaacgagtgcagagcatagaagtaagagaagttgaagttattgaactctgctcctaatgcaccgtatggggttctgaggccatagcggagaacaggacttccacagggttgctgggaaactgtggacaagtcacttaattggtgcctcaatttcttgagcataatggggattctcatttgcctgacttacctaactagtggattgcgaggatcaactgctttagcataggatctcacaggaagagtctcccagaaagtgcagcctgagggcacacctgatatttggccacttcattagggagtacaatcccaggaagcagacttgagaaaccagtgtgaggcaaggaagggagaaggttatgggttgaattttgtgtccccctgccctccccaccccactccccctgccaaaaaatatgttaaaatcccaaccaccacttcctcagaaggcgacactttggaaattgagtcattgcagatgtaattagtaaagataaaatcatgctgaaatagagtacccttaatgcagtagaactggtgtccttgcaagaagacaggcagatatacagggagaatgctatgtgaagatgaatactgacattggagtgatatatctacaagccaaggaatgcctgggactactggaatgccttgctggaagaggcaaggaaggatccttccctagaaccttcagagataacatggccctaccaataacacggttttggattcctagcctccaaaactgcgaggcaatacatttctggtgtttaagccactgagtttgtggttctttgctgtgccagccctaggaaacacatgcagtgagggaggtacagcaaaggcgtcattaagccaaccgctgctaactgactgcttgaaatcatggacttatcctccagtaatcagcgtaagctgcatctcaggacaatctggtcaaggagaaaaagggagaagggtttatccaccagccccatctcctattagtcaaaggtttgcctcaagaggccttcattttcccacattcttggttgttgtgcatgtgcaagtctagttttgtggtatcctatgactcaatgtcaacatgaaatctggaagtgggaggcaagaggcccacagtaggcatgagctgagacactgctaggctgcccctctgggaagtacatcagacctgtgcagaactggttgaaatagcagcagctggaacaaggtaggtgaggctatgaggatctaaagaggagcctgagggtacactggcacaggcattgataagcacttacaagggggcataacagagagctacagaaacaaattgtgaggcagtttaacctaatttatgatgtcaggcaatactttttggagtaaagaatgcttaagctgagatacaaaaggtgagtagccgagtgaccttgggaaagtcattatatgtcaaaacttcaaagtatttcctgattcacccaaattttcctccctaaaatttaatctaaaaatgtttaagcattattttttcaagtcactttttttttcttttcaaaaataaaaatgactttatttttcttacggattgtaagaataagacttgctctattttaaaatgtcaatgatattgaagaacgtaagaaagaatatcacccataattccatctactcagagaaaatataaaggtccagatgaactgggttatgctatgataacaggacagcaaaaccctaacatcttggtggctcaaaactgccaaggtttgttatgttttttcatgcatgctatgtatccagtgtaggtgatttagggactcagtttcatattatcctcattaagggccctaggaggaccacagtctctatcatcataaaagttgctcattactgtggaaacatgagggaaacatggtgaagcaagcagtggttcttaaaatcttccatccacaagccactcacctcatttcatttcatttcattggccaaagcaagtcacatggctgtgcctaactgcaaggggatggggaagtgtaattcctgaaggaggataaccatagctatcagtgaactgcactacaactgtcacagataaccatgatcaacatttacaagtcaacagattttggggtttgagatttatttgtgaatttatttcttttcactgatttctgtgaaagagaagagtaagaaaataacaaatggctaaagaaaacccatcagggcaatgcagaatcatgattttctgtggaattccttaatccatactagttcatgtatcctttttcaaattgatgaacgtattagtctatgtagagatgagtgattttgacaaggataaaggatatttaaatacctcatgggtctctttttccacctccctttcactttagtgtgaatgacattgtggttcttggaccagaacagttctatgccaccagagaccactattttaccaactccctcctgtcattttttgagatgatcttggatcttcgctggacttatgttcttttctacagcccaagggaggttaaagtggtggccaaaggattttgtagtgccaatgggatcacagtctcagcagaccagaagtaagctcttttgtgtatttttctatcctttgcccttgacattttcgtggactcctttccttacgaggaagttacttccttacttaggcttacgtagtgaatatatgtgtggagggatcagttgtggccagggttcacactaaatctgtcatcctaagcaatccatttgtttccttggactttaggttcttcccagttaaaggagggatgtggacttaaggatataaggacctcattccaaatttttacataactcttgaaacacactttcctaacacactacaaaggaagataaatgagcaatacccctgccccttatgaaagtacaaagtatttgaccacttatgctaagttcagttacacaaaagctcttaggagagagggaaggctaccttagattgggcatagggattgtataagtttcagacctactgacttacaacagcagaccattcaatgagaaaaccctattttaaacagcatgaaattttatgagaaaacacttttaaaaagtgtttaaaaattggaggtttttttataaacagaagtaccttgaatattaacatgtatatttgagataatgagcaaagatgatccctgtagaaaacacctctcagtgtccttcctcttttaaaatattgtgattgagctttatggtcatttgatactttttttcaagcactagtttttagaagtatatacacttttggccttgtaagagatccacttaccttcattcaatttaaggaaaaagttgtgacttcgaagtaataagattgagcctatatatgtcatctagaaacaccagtttcattatagtcataactcatattcaaagcctgtttaaagcacttcaagaatattaaaaatactaccccattatcttcttttactgtggtttagaaaaggattgcagtggtactttcaaggagtgtgcatttttatacctcttctccaaaataaaagtgagtgttgtctctcattaccacttgcttaagtgtaaatgtcatttacttcaaaggtatgtctatgtagctgatgtagcagctaagaacattcacataatggaaaaacatgataactgggatttaactcaactgaaggtaagagtaccctgtctggcccacacaatctgacttcttaccttagtcccatacttgacccaggaatgtgccccttgaatgaggaaaacatggctatttgagagcaatgccagtgagattatgcatgcgtttctaaaatacagaagcaaagccccctaaaaacaccaactttaggtgccagaagaagctgtaggggttgtggggatgaatagggaagaaagcgaggaatcattgagacaatgtcttcactactccctctttgttgtaaggtgatacagttgggcaccttagtggataacctgactgtcgatcctgccacaggagacattttggcaggatgccatcctaatcctatgaagctactgaactataaccctgaggaccctccaggatcagaagtaagttcctatacctctctgagctcacaggcaaagctgcaagaacaaatttgttggggtgacttggaagaatttaagccagtcacatttggtgttatagaactaaagaaattttacgtatgagaaaagtaaagtttttgacaggtagggagataaggttcgttaactcttttaggccaccattaacttttcaataactcttgctgttgggaataatggaaaaacataagctcgattattcatattgacccagattgccatatcgtatttccaatcaggagatagtctctgagcaggtaggtcttgcagttagacaaagagagagttgtatatggtaccatcttctttcacactgtccaacatgaagctaagattaaaggatttaaataactgtcgcctcaaaataaaatgagtttttgcctgtaagttctaacatatacgatggtgttgaaaattgtcttattttcaagatatcatttgtgttattttaaaatatctcttctaaaacaatagcataatccattgaattttctacattaaaaacaacattataagacaactgcattttctatggcattaaggttaacaatttaaaaatctttagtgaatttatatatagctataaattctaggcacacatactcagagatttattcacaaaaatttattgagtacctgtaatgtgtcagacattgtacttatgtttaggatatatcagaaaaaatatacagagatccctgatcttaagaaagggggacaaacaatgaacaataagcataagaaataagtaaattacatagtaactttgaagatggcaaattttatgggaaaaaaggctcagcagagtaaaggggatcaggattactatatgcagcaggatgagcaggtcctactactaaagtcagagatcagagtaggcctcattgagaaagtacaatttgaaaaaaattaaaatgtgtgaatccacatttggtgatttgagaaactgaaattcaaattcaaacccagtaattggcctagtgggtaaattaggacatacagttatttctacttccagtattgctgtctttcagttaaaaatatgattatttctttttttattaatgtattagtcacagcttcttaaaaagaacacaagaaatgtaaaaagaaacaaaagtccaacctaagcctagaaccagaattgttaccctaaactaggaagcaatccttgcctcagatatgtacccctaagagtgatagacaaaactttcctttaaaagcccaaccacaatgtctgtcttaaggaaatgaaatatgatacataggattattggagaattgtttaggatctttttcgtatctctattttcaagttgaattatttttaaaattttagataagactttttgtcacaattactgacaccctttaattttggttgaatctcatgttttgtacatgaaatcaaagcttaagtatttttgtctaacaaacctgagatgaaggatctcccttaagataaaaaaaagaacaaactctgttctaataagagatatcaatatagactcgtaactcataaatttctaattgttttcctttaattccaaaataaaaattttattttattttgtttgagtgaacttcatccagcctatttggaagcctgagtgcttaaatatacactgattagcaaagttaagtgtattaatcctgggatcaataacagtactaggcagtgatgtgtcaaatgaaattccaaagtagtatccattatttatgctttctagcaactttgcagatgtgaaggggctccagctgtgatgactgccatcccatcagttaccatgttgggttggctggataactgggtgtttcttcattattttgtcttgtttctctccccatactgtaatctcaaaggcaagattcttcccacagagggaggaccaccatccacttgagaactaaataagagcatcttaactccttctgtaagggatgcctgcactaaaaaaattgtgtaagtcatccctgaggaatttggctaatgtcagaaagccagttcactttggtgcatagatatctatgacattagtactttcatcagaagaagaacaatttattgaagatatacagattttagcttctgatttctgaaaaatagatttatcctagaatgtttgggaaggacatcatgaaacaggtgtttactcacataatatactaataaacgatcttttctcgacaggtacttcgcatccagaatgttttgtctgagaagcccagggtgagcaccgtgtatgccaacaatggctctgtgcttcagggcacctctgtggcttctgtgtaccatgggaaaattctcataggcaccgtatttcacaaaactctgtactgtgagctctagactctagata

SEQ ID NO: 147 - DNA, 4221 bp, Homo sapiens
atggggctagaagcactggtgcccctggccgtgatagtggccatcttcctgctcctggtggacctgatgcaccggcgccaacgctgggctgcacgctacccaccaggccccctgccactgcccgggctgggcaacctgctgcatgtggacttccagaacacaccatactgcttcgaccaggtgagggaggaggtcctggagggcggcagaggtgctgaggctcccctaccagaagcaaacatggatggtgggtgaaaccacaggctggaccagaagccaggctgagaaggggaagcaggtttgggggacgtcctggagaagggcatttatacatggcatgaaggactggattttccaaaggccaaggaagagtagggcaagggcctggaggtggagctggacttggcagtgggcatgcaagcccattgggcaacatatgttatggagtacaaagtcccttctgctgacaccagaaggaaaggccttgggaatggaagatgagttagtcctgagtgccgtttaaatcacgaaatcgaggatgaagggggtgcagtgacccggttcaaaccttttgcactgtgggtcctcgggcctcactgcctcaccggcatggaccatcatctgggaatgggatgctaactggggcctctcggcaattttggtgactcttgcaaggtcatacctgggtgacgcatccaaactgagttcctccatcacagaaggtgtgacccccacccccgccccacgatcaggaggctgggtctcctccttccacctgctcactcctggtagccccgggggtcgtccaaggttcaaataggactaggacctgtagtctggggtgatcctggcttgacaagaggccctgaccctccctctgcagttgcggcgccgcttcggggacgtgttcagcctgcagctggcctggacgccggtggtcgtgctcaatgggctggcggccgtgcgcgaggcgctggtgacccacggcgaggacaccgccgaccgcccgcctgtgcccatcacccagatcctgggtttcgggccgcgttcccaaggcaagcagcggtggggacagagacagatttccgtgggacccgggtgggtgatgaccgtagtccgagctgggcagagagggcgcggggtcgtggacatgaaacaggccagcgagtggggacagcgggccaagaaaccacctgcactagggaggtgtgagcatggggacgagggcggggcttgtgacgagtgggcggggccactgccgagacctggcaggagcccaatgggtgagcgtggcgcatttcccagctggaatccggtgtcgaagtgggggcggggaccgcacctgtgctgtaagctcagtgtgggtggcgcggggcccgcggggtcttccctgagtgcaaaggcggtcagggtgggcagagacgaggtggggcaaagcctgccccagccaagggagcaaggtggatgcacaaagagtgggccctgtgaccagctggacagagccagggactgcgggagaccagggggagcatagggttggagtgggtggtggatggtggggctaatgccttcatggccacgcgcacgtgcccgtcccacccccaggggtgttcctggcgcgctatgggcccgcgtggcgcgagcagaggcgcttctccgtgtccaccttgcgcaacttgggcctgggcaagaagtcgctggagcagtgggtgaccgaggaggccgcctgcctttgtgccgccttcgccaaccactccggtgggtgatgggcagaagggcacaaagcgggaactgggaaggcgggggacggggaaggcgaccccttacccgcatctcccacccccaggacgcccctttcgccccaacggtctcttggacaaagccgtgagcaacgtgatcgcctccctcacctgcgggcgccgcttcgagtacgacgaccctcgcttcctcaggctgctggacctagctcaggagggactgaaggaggagtcgggctttctgcgcgaggtgcggagcgagagaccgaggagtctctgcagggcgagctcccgagaggtgccggggctggactggggcctcggaagagcaggatttgcatagatgggtttgggaaaggacattccaggagaccccactgtaagaagggcctggaggaggaggggacatctcagacatggtcgtgggagaggtgtgcccgggtcagggggcaccaggagaggccaaggactctgtacctcctatccacgtcagagatttcgattttaggtttctcctctgggcaaggagagagggtggaggctggcacttggggagggacttggtgaggtcagtggtaaggacaggcaggccctgggtctacctggagatggctggggcctgagacttgtccaggtgaacgcagagcacaggagggattgagaccccgttctgtctggtgtaggtgctgaatgctgtccccgtcctcctgcatatcccagcgctggctggcaaggtcctacgcttccaaaaggctttcctgacccagctggatgagctgctaactgagcacaggatgacctgggacccagcccagcccccccgagacctgactgaggccttcctggcagagatggagaaggtgagagtggctgccacggtggggggcaagggtggtgggttgagcgtcccaggaggaatgaggggaggctgggcaaaaggttggaccagtgcatcacccggcgagccgcatctgggctgacaggtgcagaattggaggtcatttgggggctaccccgttctgtcccgagtatgctctcggccctgctcaggccaaggggaaccctgagagcagcttcaatgatgagaacctgcgcatagtggtggctgacctgttctctgccgggatggtgaccacctcgaccacgctggcctggggcctcctgctcatgatcctacatccggatgtgcagcgtgagcccatctgggaaacagtgcaggggccgagggaggaagggtacaggcgggggcccatgaactttgctgggacacccggggctccaagcacaggcttgaccaggatcctgtaagcctgacctcctccaacataggaggcaagaaggagtgtcagggccggaccccctgggtgctgacccattgtggggacgcatgtctgtccaggccgtgtccaacaggagatcgacgacgtgatagggcaggtgcggcgaccagagatgggtgaccaggctcacatgccctacaccactgccgtgattcatgaggtgcagcgctttggggacatcgtccccctgggtgtgacccatatgacatcccgtgacatcgaagtacagggcttccgcatccctaaggtaggcctggcgccctcctcaccccagctcagcaccagcacctggtgatagccccagcatggctactgccaggtgggcccactctaggaaccctggccacctagtcctcaatgccaccacactgactgtccccacttgggtggggggtccagagtataggcagggctggcctgtccatccagagcccccgtctagtggggagacaaaccaggacctgccagaatgttggaggacccaacgcctgcagggagagggggcagtgtgggtgcctctgagaggtgtgactgcgccctgctgtggggtcggagagggtactgtggagcttctcgggcgcaggactagttgacagagtccagctgtgtgccaggcagtgtgtgtcccccgtgtgtttggtggcaggggtcccagcatcctagagtccagtccccactctcaccctgcatctcctgcccagggaacgacactcatcaccaacctgtcatcggtgctgaaggatgaggccgtctgggagaagcccttccgcttccaccccgaacacttcctggatgcccagggccactttgtgaagccggaggccttcctgcctttctcagcaggtgcctgtggggagcccggctccctgtccccttccgtggagtcttgcaggggtatcacccaggagccaggctcactgacgcccctcccctccccacaggccgccgtgcatgcctcggggagcccctggcccgcatggagctcttcctcttcttcacctccctgctgcagcacttcagcttctcggtgcccactggacagccccggcccagccaccatggtgtctttgctttcctggtgagcccatccccctatgagctttgtgctgtgccccgctagaatg

SEQ ID NO: 148 - DNA, 4221 bp, Homo sapiens; identical to SEQ ID NO: 147

SEQ ID NO: 149 - DNA, 10 bp, Homo sapiens
aaatgttgac

SEQ ID NO: 150 - DNA, 10 bp, Homo sapiens
aagtatcgtc

SEQ ID NO: 151 - DNA, 10 bp, Homo sapiens
gaatatcgac

SEQ ID NO: 152 - DNA, 10 bp, Homo sapiens
gaatatcaac
